(19) United States
(12) Patent Application Publication
(10) Pub. No.: US 2021/0380645 A1
(43) Pub. Date: Dec. 9, 2021

(54) Efficient Protein Expression System for Expressing Bt Insecticidal Protein

(71) Applicants: SYNGENTA PARTICIPATIONS AG, Basel (CH); SYNGENTA BIOTECHNOLOGY CHINA CO., LTD., Beijing (CN)

(72) Inventor: Qian Zheng, Beijing (CN)

(73) Assignee: SYNGENTA PARTICIPATIONS AG, Basel (CH)

(21) Appl. No.: 17/286,125

(22) PCT Filed: Oct. 14, 2019
(86) PCT No.: PCT/CN2019/111040

§ 371 Date: Apr. 16, 2021

(30) Foreign Application Priority Data
Oct. 18, 2018 (CN) 201811213835.X

(51) Int. Cl. C07K 14/245; C12N 9/86; C12N 15/70

(52) U.S. Cl. CPC C07K 14/245; C12Y 305/02006; C12N 15/70; C12N 9/86

(57) ABSTRACT

An efficient protein expression system for expressing a Bt insecticidal protein. Said protein expression system uses Bla (beta-lactamase) as a fusion tag, so that Bt genes unable to be expressed as soluble proteins are expressed as soluble proteins.

### TECHNICAL FIELD

[0001] The present invention relates to the field of protein (in particular, Bt protein) expression. The present invention provides an efficient protein expression system for expressing a Bt insecticidal protein. The protein expression system uses Bla (beta-lactamase) as a fusion tag, so that Bt genes unable to be expressed as soluble proteins are expressed efficiently as soluble proteins.

### BACKGROUND ART

[0002] In vitro expression technology of a protein is an important part of genetic engineering technology. Compared with other protein expression systems, Escherichia coli is an efficient and economical way, and the expression level of a recombinant protein can reach 50% of the total protein content of Escherichia coli. The recombinant protein with a normal biochemical activity is usually in a soluble form. Therefore, in order to obtain active proteins, soluble expression pathways are usually used.

[0003] A Bt protein is a parasporal crystal protein of Bacillus thuringiensis formed in bacteria during a sporulation period. The Bt protein is a widely used biopesticide, which is safe and has a high-efficiency and broad-spectrum insecticidal activity, and is harmless to humans, animals and non-target pests. Exploring new Bt proteins has very high commercial application value.

[0004] Expresso® Solubility & Expression Screening System from Lucigen is a protein expression tag screening kit containing 7 fusion tags. Gene fragments can be conveniently connected to 8 different vectors through homologous recombination reactions. Through the rapid screening of 7 different fusion tags, the most suitable tag for expressing the target protein is obtained (see Table 1 below).

TABLE 1

| # | Fusion tag | AA length | kDa* | pI | Description |
|---|---|---|---|---|---|
| 1 | 6xHis-AFV | 113 | 13.5 | 5.0 | Hypothetical protein from |
| | | | | | Acidianus filovirus 1 |
| 2 | 6xHis-SlyD | 210 | 22.7 | 5.2 | FKBP-type peptidylprolyl |
| | | | | | cis-trans isomerase |
| 3 | 6xHis-Tsf | 297 | 32.2 | 5.7 | E. coli elongation factor |
| 4 | 6xHis-SUMO | 115 | 13.3 | 5.2 | Small ubiquitin-like |
| | | | | | modifier |
| 5 | 6xHis-Bla | 381 | 41.3 | 4.4 | Beta-lactamase |
| 6 | 6xHis-MBP | 382 | 42.1 | 5.5 | Maltose-binding protein |
| 7 | 6xHis-GST | 233 | 27.4 | 6.6 | Glutathione S-transferase |
| 8 | 6xHis control | 14 | 1.8 | 7.0 | Affinity tag |

[0005] The newly explored Bt genes need to be expressed as soluble proteins to test the insecticidal activity thereof. However, relying on the current Escherichia coli expression technology, only about 50% to 60% of Bt genes can be successfully expressed. Therefore, the successful expression of Bt genes as soluble proteins has important research and commercial value.

### SUMMARY OF THE INVENTION

[0006] The present invention establishes an efficient protein expression system. Using the existing Escherichia coli expression technology, about 50% to 60% of Bt genes can be successfully expressed as soluble proteins. Using the method of the present invention, the remaining 40% to 50% of Bt genes unable to be expressed as soluble proteins can achieve 80% successful expression (expressed as soluble proteins), and the total success rate of Bt gene expression can reach at least 80%.

[0007] In the present invention, 16 Bt genes unable to be expressed as soluble proteins were initially used as test samples and screened for fusion tags using 8 vectors in Expresso® Solubility & Expression Screening System from Lucigen. The results showed that the pSol-Bla vector could achieve 100% expression for 16 test samples. For the convenience of cloning, we modified the pSol-Bla vector from Lucigen and used the modified vector to express an additional 237 Bt genes, which are unable to be expressed as soluble proteins, in Escherichia coli; as a result, 193 genes were successfully expressed as soluble proteins, and the expression success rate was 81.4%. Therefore, for a total of 253 (16+237) Bt genes unable to be expressed as soluble proteins before, 209 (16+193) genes were successfully expressed as soluble proteins, and the expression success rate was 82.6%.

[0008] In one aspect, the present invention relates to the use of Bla, i.e., beta-lactamase, as a fusion tag for expressing a Bt protein.

[0009] In another aspect, the present invention relates to the use of a modified pSol-Bla vector as shown in FIG. 1 for expressing a Bt protein.

[0010] Preferably, in the above-mentioned uses, the Bt protein is expressed in Escherichia coli. More preferably, the Escherichia coli is Escherichia coli 10G or BL21 (DE3). Preferably, in the above-mentioned uses, the Bt protein is a Bt protein unable to be expressed.

[0011] In another aspect, the present invention relates to a fusion protein comprising a Bt protein and a beta-lactamase as a fusion tag. Preferably, the Bt protein is a Bt protein unable to be expressed.

[0012] In another aspect, the present invention relates to a nucleic acid molecule encoding the above-mentioned fusion protein.

[0013] In another aspect, the present invention relates to a vector comprising the above-mentioned nucleic acid molecule. Preferably, the vector is a pSol-Bla vector into which a Bt gene to be expressed is inserted, or a modified pSol-Bla vector as shown in FIG. 1 into which a Bt gene to be expressed is inserted.

[0014] In another aspect, the present invention relates to a cell comprising the above-mentioned vector. Preferably, the cell is an Escherichia coli cell. More preferably, the Escherichia coli cell is an Escherichia coli 10G or BL21 (DE3) cell.

[0015] In another aspect, the present invention relates to a method for expressing a Bt protein, comprising: (1) culturing the above-mentioned cell under conditions suitable for expressing the desired protein; and (2) optionally, cleaving the Bla tag to obtain a Bt protein without the tag.

[0016] In another aspect, the present invention relates to a modified pSol-Bla vector as shown in FIG. 1.

### BRIEF DESCRIPTION OF THE DRAWINGS

[0017] FIG. 1 is a map showing the modified pSol-Bla vector of the present invention.

### DETAILED DESCRIPTION OF EMBODIMENTS

[0018] The embodiments of the present invention will be described in detail below in combination with examples, but a person skilled in the art would understand that the following examples serve only to illustrate the present invention and are not intended to limit the scope of the present invention. If the specific conditions are not indicated in the examples, the conventional conditions or the conditions suggested by the manufacturer shall be followed. Any reagents or instruments used, unless the manufacture stated, are conventional products that can be obtained by market purchase.

### Example 1. Screening of Fusion Tags for 16 Bt Genes Unable to be Expressed as Soluble Proteins to Achieve Soluble Expression

[0019] We selected 16 Bt genes unable to be expressed as soluble proteins through conventional methods (for example, the expression of pET series vectors at different temperatures and IPTG induced concentrations, the use of fusion tags such as SUMO and GST, the use of different types of competent cells, cell-free culture, expression with Bt cells, etc.). Their numbers, molecular weights, and expression issues are shown in Table 2 below:

TABLE 2

| Protein | | | Molecular | | Expression |
|---|---|---|---|---|---|
| number | Gene family | SEQ ID NO | weight | | issue |
| BT-0025 | Cry1If | 1 | 80 | KD | Insoluble |
| BT-0027 | | 2 | 79 | KD | No expression |
| BT-0275 | Cry22Aa | 3 | 96 | KD | No expression |
| BT-0362 | | 4 | 73 | KD | No expression |
| BT-0425 | Cry36Aa | 5 | 56 | KD | No expression |
| BT-0435 | Cry42Aa | 6 | 75 | KD | No expression |
| BT-0445 | Vip1Aa | 7 | 138 | KD | Insoluble |
| BT-0452 | Cry19Ca | 8 | 59 | KD | No expression |
| BT-0560 | Cry20Aa | 9 | 26 | KD | No expression |
| BT-0587 | Cry49Ab | 10 | 60 | KD | No expression |
| BT-0669 | Cry2Ae | 11 | 30 | KD | Insoluble |
| BT-0685 | Cry49Ab | 12 | 51 | KD | Insoluble |
| BT-0827 | Cry48Ab2 | 13 | 86 | KD | No expression |
| BT-0830 | Cry48Ab2 | 14 | 87 | KD | No expression |
| BT-0831 | Cry54Ba1 | 15 | 80 | KD | No expression |
| HO4 | Cry1Ab.1Ca | 16 | 130 | KD | Insoluble |

[0020] Using Expresso® Solubility and Expression Screening System from Lucigen, according to the instructions thereof, the primer sequences at both ends were designed to synthesize PCR primers of these 16 genes, respectively. The target fragments of 16 genes with homologous recombination ends were obtained by PCR amplification methods. Then, after mixing the PCR products with 8 linear vectors in the kit, the chemically competent cells were transformed with plasmids. After the positive clones were identified from the obtained monoclonal plasmids by PCR, the positive clones were sent to a company for sequencing and identification. After analyzing the sequencing results, we obtained the plasmids of these 16 genes on 8 vectors, a total of 128 plasmids.

[0021] 30 μl of Escherichia coli 10G or BL21 (DE3) glycerol bacteria with these 16 genes were cultured in 3 ml of LB medium at 37° C. to an OD600 of approximately 0.5, and then 20% rhamnose was added to induce culture overnight at 18° C. The bacteria were collected and subjected to disruption by sonication, and whole bacteria and supernatant were collected respectively and boiled for 10 minutes before the expression was analyzed by SDS-PAGE. The expression of these 128 plasmids in Escherichia coli 10G and BL21 (DE3) cells was shown in Table 3 below (the first 6 genes in Table 3 were purified after successful expression and the Bla tag was cleaved to obtain a pure soluble target protein).

TABLE 3

| | Issue when | | |
|---|---|---|---|
| | expressing | | |
| | through | | |
| | conventional | Valid tag | |
| Protein | methods | 10 G | BL21 (DE3) |
| BT-0025 (80 KD) | Insoluble | 6 tags (Bla, GST, | 6 tags (Bla, GST, |
| | | His, MBP, SUMO, Tsf) | His, MBP, SUMO, Tsf) |
| BT-0827 (86 KD) | No | 4 tags (AFV | Not tested |
| | expression | Bla, GST, Tsf) | |
| BT-0830 (87 KD) | No | 5 tags (Bla, GST, | Not tested |
| | expression | MBP, Tsf, SlyD) | |
| BT-0831 (80 KD) | No | 6 tags (AFV, Bla, | Not tested |
| | expression | GST, MBP, SlyD, Tsf) | |
| HO4 (130 KD) | Insoluble | 4 tags (AFV, | Not tested |
| | | Bla, MBP, Tsf) | |
| BT-0027 (79 KD) | No | 3 tags (Bla, | Not tested |
| | expression | MBP, SlyD) | |
| BT-0685 (51 KD) | Insoluble | All 8 tags | 5 tags (AFV, Bla, |
| | | | GST, MBP, His) |
| BT-0669 (30 KD) | Insoluble | 7 tags (All, | 7 tags (All |
| | | except for GST) | except for GST) |
| BT-0587 (60 KD) | No | 6 tags (AFV, Bla, | All 8 tags |
| | expression | GST, His, MBP, SUMO) | |
| BT-0560 (26 KD) | No | 3 tags (Bla, MBT, Tsf) | 4 tags (AFV, |
| | expression | | GST, MBP, SUMO) |
| BT-0362 (73 KD) | No | 4 tags (Bla, MBP, | Not tested |
| | expression | SlyD, Tsf) | |
| BT-0425 (56 KD) | No | 5 tags (AFV, Bla, | Not tested |
| | expression | MBP, SUMO, Tsf) | |
| BT-0452 (59 KD) | No | 5 tags (AFV, Bla, | Not tested |
| | expression | GST, MBP, SlyD) | |
| BT-0435 (75 KD) | No | 2 tags (AFV, Bla) | Not tested |
| | expression | | |
| BT-0445 (138 KD) | Insoluble | 4 tags (AFV, | 4 tags (AFV, Bla, |
| | | Bla, MBP, Tsf) | MBP, Tsf) |
| BT-0275 (96 KD) | No | 2 tags (AFV, Bla) | Not tested |
| | expression | | |

[0022] The results showed that most of the 8 vectors with different tags in the kit could express individual genes in these 16 Bt genes, and only the pSol-Bla vector was effective for all 16 genes (that is, the genes could be expressed as soluble proteins), implying that the Bla tag specifically improved the effect of the Bt gene expression.

### Example 2. Modification of pSol-Bla Vector from Lucigen and Use of the Modified pSol-Bla Vector on 237 Bt Genes Unable to be Expressed as Soluble Proteins

[0023] For the convenience of cloning, we made a few modifications to the pSol-Bla vector from Lucigen, wherein the stop codon TAA at positions 1326-1328 in the original vector was removed, and the sequence “ggatccggctcaggctcaggctcaggctcaggctcaggctcactcgag” was added at position 1326 of the original vector, the sequence comprising one BamHI enzyme digestion site and one XhoI enzyme digestion site. The modified pSol-Bla vector was as shown in FIG. 1. We selected 237 Bt genes unable to be expressed as soluble proteins (using a pET28a vector, the soluble form of protein cannot be obtained in the supernatant of the cell lysate under conditions of induction overnight with 0.2-0.5 mM IPTG at 18° C.), and cloned the genes into the modified pSol-Bla vector through enzyme digestion and ligation. After transforming the vector into Escherichia coli 10G cells, we used the same method to express these 237 plasmids: 30 μl of glycerol bacteria were added to 3 ml of LB medium and cultured at 37° C. to an OD600 of approximately 0.5, and then 20% rhamnose was added to induce the culture overnight at 18° C. The bacteria were collected and subjected to disruption by sonication, and whole bacteria and supernatant were collected respectively and boiled for 10 minutes before the expression was analyzed by SDS-PAGE.

[0024] The results showed that 193 out of the 237 Bt genes unable to be expressed as soluble proteins obtained soluble fusion proteins in this way, and the success rate was up to 81.4%. This result showed that the vector fused with Bla could specifically increase the success rate of the successful expression of the Bt gene.

[0025] The information regarding the 237 Bt genes unable to be expressed as soluble proteins is as follows:

TABLE 4

| | | | Molecular | |
|---|---|---|---|---|
| Protein | | | weight | Whether expressed |
| number | Gene family | SEQ ID NO | (KD) | in this experiment |
| BT-0269 | Cry41Ab | 17 | 93 | Yes |
| BT-0290 | Cry19Ca | 18 | 136 | No |
| BT-0397 | Cry59Aa | 19 | 77 | Yes |
| BT-0398 | Cry4Ca | 20 | 75 | Yes |
| BT-0411 | Vip2Ad | 21 | 22.5 | Yes |
| BT-0426 | Cry59Aa | 22 | 73 | Yes |
| BT-0434 | Cry21Ba | 23 | 120 | Yes |
| BT-0439 | Cry36Aa | 24 | 57 | Yes |
| BT-0441 | Cry68Aa | 25 | 82 | Yes |
| BT-0455 | Cry41Ba | 26 | 94 | Yes |
| BT-0456 | Cry22Ab | 27 | 79 | Yes |
| BT-0464 | Cry44Aa | 28 | 59 | Yes |
| BT-0474 | Cry41Ba | 29 | 92 | Yes |
| BT-0481 | Cry24Ca | 30 | 45 | Yes |
| BT-0482 | Cry4Cc | 31 | 49 | Yes |
| BT-0483 | Cry4Ca | 32 | 131 | Yes |
| BT-0526 | Cry2Aa | 33 | 39 | Yes |
| BT-0532 | Vip2Af | 34 | 50 | Yes |
| BT-0552 | Cry15Aa | 35 | 34 | Yes |
| BT-0555 | Cry52Aa | 36 | 77 | Yes |
| BT-0557 | Cry53Ab | 37 | 74 | No |
| BT-0567 | Cry70Bb | 38 | 106 | Yes |
| BT-0579 | Cry40Da | 39 | 74 | Yes |
| BT-0581 | Cry40Da | 40 | 72 | Yes |
| BT-0585 | Cry36Aa | 41 | 52 | Yes |
| BT-0586 | Cry49Aa | 42 | 56 | Yes |
| BT-0591 | Cry4Cc | 43 | 78 | No |
| BT-0596 | Cry4Ca | 44 | 61 | Yes |
| BT-0597 | Cry69Aa | 45 | 135 | No |
| BT-0599 | Cry54Aa | 46 | 72 | Yes |
| BT-0600 | Cry56Aa | 47 | 70 | Yes |
| BT-0603 | Cry53Ab | 48 | 76 | Yes |
| BT-0609 | Cry4-like | 49 | 26 | Yes |
| BT-0610 | Cry68Aa | 50 | 89 | Yes |
| BT-0612 | Cry15Aa | 51 | 40 | No |
| BT-0613 | Cry51Aa | 52 | 37 | Yes |
| BT-0624 | Cry22Ab | 53 | 64 | Yes |
| BT-0626 | Cry49Aa | 54 | 23 | Yes |
| BT-0663 | Cry68Aa | 55 | 82 | Yes |
| BT-0666 | Cry68Aa | 56 | 90 | Yes |
| BT-0667 | Cry68Aa | 57 | 91 | Yes |
| BT-0671 | Cry14Ab | 58 | 90 | Yes |
| BT-0681 | Cry42Aa | 59 | 88 | Yes |
| BT-0683 | Cry19Ca | 60 | 76 | Yes |
| BT-0713 | Cry41Aa1 | 61 | 56 | Yes |
| BT-0735 | Cry4Cb1 | 62 | 79 | Yes |
| BT-0744 | Cry60Aa | 63 | 35 | Yes |
| BT-0760 | Cry64Aa1 | 64 | 37 | No |
| BT-0762 | Cry64Aa1 | 65 | 36 | No |
| BT-0764 | Cry15Aa1 | 66 | 34 | Yes |
| BT-0766 | Cry54Aa2 | 67 | 78 | Yes |
| BT-0767 | Cry20Ba1 | 68 | 83 | Yes |
| BT-0768 | Cry51Aa1 | 69 | 35 | No |
| BT-0770 | Cry51Aa1 | 70 | 40 | Yes |
| BT-0772 | Cry70Bb1 | 71 | 110 | No |
| BT-0776 | Cry32Mb1 | 72 | 138 | No |
| BT-0777 | Cry32Ra1 | 73 | 126 | Yes |
| BT-0778 | Cry32Cb1 | 74 | 96 | Yes |
| BT-0781 | cry69Aa1 | 75 | 81 | Yes |
| BT-0783 | Cry40Da1 | 76 | 74 | Yes |
| BT-0784 | Cry4Ca1 | 77 | 65 | No |
| BT-0785 | Cry55Aa1 | 78 | 35 | Yes |
| BT-0787 | Cry55Aa1 | 79 | 35 | No |
| BT-0788 | Cry60Aa1 | 80 | 36 | Yes |
| BT-0795 | Cry41Aa1 | 81 | 66 | Yes |
| BT-0878 | Cry4Ca1 | | 66 | Yes |
| BT-0879 | Cry40Da1 | | 74 | Yes |
| BT-0895 | Cry49Ab1 | | 43 | Yes |
| BT-0903 | Vip2Ba2 | | 44 | Yes |
| BT-0905 | Vip2Ac1 | | 58 | Yes |
| BT-0911 | Cry14Aa1 | 82 | 91 | Yes |
| BT-0912 | Cry32Ta1 | 83 | 147 | Yes |
| BT-0914 | Cry73Aa1 | 84 | 89 | Yes |
| BT-0915 | Cry32Sa1 | 85 | 139 | Yes |
| BT-0916 | Cry41Ba2 | 86 | 86 | Yes |
| BT-0920 | Cry21Ca1 | 87 | 146 | Yes |
| BT-0922 | Cry4Aa4 | 88 | 137 | Yes |
| BT-0927 | Cry8Ga3 | 89 | 37 | Yes |
| BT-0934 | Cyt2Ca1 | 90 | 25 | Yes |
| BT-0936 | Cry49Ab1 | 91 | 31 | Yes |
| BT-0938 | Cry49Ab1 | 92 | 42 | Yes |
| BT-0939 | Cry13Aa1 | 93 | 68 | Yes |
| BT-0941 | Cry32Ra1 | 94 | 155 | No |
| BT-0942 | Cry60Aa3 | 95 | 36 | Yes |
| BT-0943 | Cry8La1 | 96 | 115 | Yes |
| BT-0944 | Cry30Db1 | 97 | 78 | Yes |
| BT-0946 | Cry51Aa2 | 98 | 32 | Yes |
| BT-0948 | Cry32Da1 | 99 | 138 | Yes |
| BT-0949 | Cry8Ca1 | 100 | 132 | Yes |
| BT-0950 | Cry60Ba3 | 101 | 36 | Yes |
| BT-0951 | Cry32Ra1 | 102 | 147 | Yes |
| BT-0952 | Cry73Aa1 | 103 | 59 | Yes |
| BT-0953 | Cry73Aa1 | 104 | 57 | Yes |
| BT-0954 | Cry45Aa | 105 | 31 | Yes |
| BT-0955 | Cry32Qa1 | 106 | 150 | Yes |
| BT-0956 | Cry20Aa1 | 107 | 81 | Yes |
| BT-0957 | Cry54Aa2 | 108 | 77 | Yes |
| BT-0958 | Cry60Aa3 | 109 | 36 | Yes |
| BT-0961 | Cry41Ba2 | 110 | 63 | No |
| BT-0962 | Cry19Ca1 | 111 | 86 | Yes |
| BT-0964 | Cry28Aa2 | 112 | 125 | Yes |
| BT-0965 | Cry60Ba3 | 113 | 35 | Yes |
| BT-0968 | Cry43Ca1 | 114 | 145 | Yes |
| BT-0970 | Cry4Ca1 | 115 | 139 | Yes |
| BT-0976 | Cry8Ib1 | 116 | 137 | No |
| BT-0977 | Cry22Ba1 | 117 | 53 | Yes |
| BT-0979 | Cry42Aa1 | 118 | 57 | Yes |
| BT-0980 | Cry30Aa1 | 119 | 78 | Yes |
| BT-0981 | Cry4Ca1 | 120 | 136 | Yes |
| BT-0983 | Cry54Aa2 | 121 | 80 | Yes |
| BT-0984 | Cry4Cb2 | 122 | 129 | Yes |
| BT-0985 | Cyt2Ca1 | 123 | 29 | Yes |
| BT-0987 | Cry36Aa1 | 124 | 54 | Yes |
| BT-0989 | Cry4Ca1 | 125 | 64 | Yes |
| BT-0991 | Cry40Da1 | 126 | 76 | Yes |
| BT-0993 | Cry70Bb1 | 127 | 113 | Yes |
| BT-0997 | Cry8Ia1 | 128 | 139 | No |
| BT-0998 | Cry45Aa | 129 | 29 | Yes |
| BT-0999 | Cry45Aa | 130 | 30 | Yes |
| BT-1000 | Cry32Ra1 | 131 | 151 | Yes |
| BT-1002 | Cry11Bb1 | 132 | 33 | Yes |
| BT-1003 | Cry56Aa2 | 133 | 78 | Yes |
| BT-1004 | Cry53Ab1 | 134 | 76 | Yes |
| BT-1006 | Cry60Ba3 | 135 | 35 | Yes |
| BT-1008 | Cry60Ba3 | 136 | 35 | Yes |
| BT-1009 | Cry10Aa4 | 137 | 82 | No |
| BT-1010 | Cry9Ga1 | 138 | 84 | Yes |
| BT-1013 | Cry32Ca1 | 139 | 145 | Yes |
| BT-1015 | Cry32Qa1 | 140 | 143 | No |
| BT-1018 | Vip1Ba2 | 141 | 88 | Yes |
| BT-1019 | Cry60Ba3 | 142 | 32 | Yes |
| BT-1020 | Cry2Ah1 | 143 | 57 | Yes |
| BT-1021 | Cry70Bb1 | 144 | 109 | Yes |
| BT-1022 | Cry30Ga2 | 145 | 81 | No |
| BT-1023 | Cry39Aa1 | 146 | 78 | Yes |
| BT-1026 | Cry56Aa2 | 147 | 73 | Yes |
| BT-1027 | Cry72Aa1 | 148 | 79 | Yes |
| BT-1028 | Cry30Fa1 | 149 | 79 | Yes |
| BT-1029 | Cyt2Aa4 | | 29 | No |
| BT-1031 | Cry40Da1 | 150 | 86 | Yes |
| BT-1032 | Cry4Ca1 | 151 | 64 | Yes |
| BT-1033 | Cry73Aa1 | 152 | 64 | Yes |
| BT-1034 | Vip2Ae2 | 153 | 84 | Yes |
| BT-1036 | Cry32Qa1 | 154 | 143 | Yes |
| BT-1037 | Cry54Ba1 | 155 | 34 | Yes |
| BT-1042 | Cry4Ba5 | 156 | 134 | Yes |
| BT-1045 | Cry67Aa2 | 157 | 125 | Yes |
| BT-1048 | Cry32Cb1 | 158 | 144 | Yes |
| BT-1050 | Vip3Ad1 | 159 | 104 | Yes |
| BT-1051 | Cry73Aa1 | 160 | 54 | Yes |
| BT-1054 | Cry2Aa3 | 161 | 36 | Yes |
| BT-1055 | Cry73Aa1 | 162 | 58 | Yes |
| BT-1057 | Cry15Aa1 | 163 | 38 | Yes |
| BT-1060 | Cry4Ba5 | 164 | 140 | No |
| BT-1062 | Cry8Aa1 | 165 | 77 | Yes |
| BT-1064 | Cry8Ga3 | 166 | 129 | Yes |
| BT-1065 | Cry29Aa1 | 167 | 78 | Yes |
| BT-1068 | Cry51Aa2 | 168 | 32 | Yes |
| BT-1069 | Cry70Bb1 | 169 | 93 | Yes |
| BT-1070 | Cry4Aa4 | 170 | 134 | No |
| BT-1073 | Cry32La1 | 171 | 137 | No |
| BT-1076 | Cry60Aa3 | 172 | 40 | No |
| BT-1078 | Cry22Aa3 | 173 | 33 | Yes |
| BT-1084 | Cry33Aa1 | 174 | 30 | Yes |
| BT-1085 | Cry32La1 | 175 | 128 | Yes |
| BT-1087 | Cry32La1 | 176 | 75 | Yes |
| BT-1088 | Cry73Aa1 | 177 | 91 | Yes |
| BT-1090 | Cyt2Aa4 | 178 | 31 | Yes |
| BT-1091 | Cry32Ra1 | 179 | 151 | No |
| BT-1092 | Cry51Aa1 | 180 | 35 | Yes |
| BT-1093 | Vip1Aa2 | 181 | 88 | Yes |
| BT-1094 | Cry73Aa1 | 182 | 94 | Yes |
| BT-1095 | Cry32Ra1 | 183 | 147 | Yes |
| BT-1102 | Vip3Ca2 | 184 | 105 | Yes |
| BT-1106 | Cry42Aa1 | 185 | 55 | Yes |
| BT-1110 | Cry6Aa3 | 186 | 42 | No |
| BT-1113 | Cry32Ra1 | 187 | 150 | Yes |
| BT-1114 | Cry41Aa1 | 188 | 96 | Yes |
| BT-1116 | Cry15Aa1 | 189 | 37 | Yes |
| BT-1120 | Cry41Ba2 | 190 | 109 | Yes |
| BT-1121 | Cry43Ca1 | 191 | 137 | Yes |
| BT-1122 | Cry64Aa1 | 192 | 33 | Yes |
| BT-1124 | CryL (BT-0174) | 193 | 119 | Yes |
| BT-1125 | Cry73Aa1 | 194 | 55 | Yes |
| BT-1126 | Cry16Aa1 | 195 | 50 | Yes |
| BT-1127 | Cry29Aa1 | 196 | 61 | Yes |
| BT-1272 | Cry66Aa2 | 197 | 159 | Yes |
| BT-1274 | Vip1Ba1 | 198 | 97 | Yes |
| BT-1275 | Cry55Aa1 | 199 | 44 | Yes |
| BT-1276 | Cry55Aa1 | 200 | 40 | Yes |
| BT-1277 | Cry1Fb4 | 201 | 53 | Yes |
| BT-1280 | Cry1Ia11 | 202 | 83 | Yes |
| BT-1283 | Cry12Aa1 | 203 | 96 | Yes |
| BT-1284 | Cry15Aa1 | 204 | 40 | Yes |
| BT-1285 | Cry60Ba3 | 205 | 35 | No |
| BT-1287 | Cry60Aa1 | 206 | 35 | No |
| BT-1292 | Cry71Aa1 | 207 | 71 | Yes |
| BT-1296 | Cry22Ab2 | 208 | 93 | Yes |
| BT-1297 | Cry22Ba1 | 209 | 99 | No |
| BT-1300 | Cry32Ra1 | 210 | 149 | No |
| BT-1305 | Cry37Aa1 | 211 | 16 | Yes |
| BT-1306 | Cry4Ca1 | 212 | 60 | Yes |
| BT-1308 | Cry59Aa1 | 213 | 75 | No |
| BT-1312 | Cry45Aa | 214 | 31 | Yes |
| BT-1314 | Cry36Aa1 | 215 | 57 | Yes |
| BT-1316 | Cry49Ab1 | 216 | 43 | No |
| BT-1317 | Cry36Aa1 | 217 | 55 | Yes |
| BT-1318 | Cry49Ab1 | 218 | 44 | No |
| BT-1319 | Cry49Ab1 | 219 | 43 | Yes |
| BT-1322 | Cry49Aa4 | 220 | 29 | Yes |
| BT-1323 | Cry4Aa1 | 221 | 80 | No |
| BT-1324 | Cry4Ba5 | 222 | 79 | Yes |
| BT-1331 | Cyt2Aa3 | 223 | 27 | Yes |
| BT-1333 | Cry73Aa1 | 224 | 57 | Yes |
| BT-1334 | Cry73Aa1 | 225 | 57 | Yes |
| BT-1336 | Cry64Aa1 | 226 | 40 | Yes |
| BT-1337 | Cry45Aa | 227 | 41 | Yes |
| BT-1338 | Cry45Aa | 228 | 48 | Yes |
| BT-1339 | Cry60Aa1 | 229 | 38 | Yes |
| BT-1340 | Vip1Bb1 | 230 | 108 | Yes |
| BT-1342 | Vip2Ba1 | 231 | 29 | No |
| BT-1343 | Vip2Ba2 | 232 | 29 | No |
| BT-1344 | Vip2Ac1 | 233 | 28 | No |
| BT-1345 | Vip2Ba2 | 234 | 30 | Yes |
| BT-1346 | Vip2Aa1 | 235 | 33 | No |
| BT-1347 | Vip2Ba1 | 236 | 30 | Yes |
| BT-1353 | Vip2Ba2 | 237 | 29 | No |
| BT-1354 | Vip2Ac1 | 238 | 26 | No |
| BT-1356 | Vip2Aa2 | 239 | 25 | No |
| BT-1357 | Vip2Ba2 | 240 | 29 | No |
| BT-1358 | Vip2Aa2 | 241 | 26 | No |
| BT-1359 | Vip2Aa1 | 242 | 28 | Yes |
| BT-1360 | Vip2Ad1 | 243 | 57 | No |
| BT-1362 | Vip1Bb1 | 244 | 118 | Yes |
| BT-1366 | Cry22Aa3 | 245 | 75 | Yes |
| BT-1369 | Cry3Ca1 | 246 | 67 | Yes |
| BT-1371 | Cry22Aa3 | 247 | 122 | Yes |

### REFERENCES

[0026] 1. Tokunaga Hi, et al., (2010) Appl Microbiol Biotechnol. 88, 1223
[0027] 2. Bruce E. Tabashnik, et al., Sci Rep. 2015; 5: 15107

The application's sequence listing, which the Patent Office published only in electronic form, follows.

SEQUENCE LISTING (247 sequences)

SEQ ID NO: 1 - DNA, 2133 bp, Artificial sequence
  Synthetic polynucleotide or polypeptide
atgaaatctaagaatcaaaatatgcatcaaagcttgtctaacaatgcgacagttgataaaaactttacaggttcactagaaaataacacaaatacggaattacaaaactttaatcatgaaggtatagagccgtttgttagtgtatcaacaattcaaacgggtattggtattgctggtaaaatccttggtaacctaggcgttccctttgctgggcaagtagctagcctctatagttttatcctaggtgagctttggcccaaagggaaaagccaatgggaaatttttatggaacatgtagaagagcttattaatcaaaagatatcgacttatgcaagaaacaaagcacttgcagatttaaaaggattaggagatgctttggctgtctaccatgaatcgctggaaagttggattaaaaatcgcaataacacaagaactagaagtgttgtcaagagccaatacattaccttggaacttatgttcgtacaatcattaccttcttttgcagtgtctggagaggaagtaccactattaccaatatatgctcaagctgcaaatttacacttgttgctattaagagatgcgtctatttttggaaaagaatggggattatcagactcagaaatttcgacattctataatcgtcaagtggaaagaacatcagattattccgatcattgcacgaaatggtttgatacgggcttgaatagattaaagggctcaaatgctgaaatctgggtaaagtataatcaattccgtagagacatgactttaatggtactagatttagtggcactattccaaagctatgatacacatatgtacccaattaaaactacagcccaacttactagagaagtatatacaaacgcattggggacagtacatccgcacccaagttttacaagtacgacttggtataataataatgcaccttcgttttctgccatagaggctgccgttatccgaagcccgcacctactcgattttctagaacaagttacaatttacagcttattaagccgatggagtaacactcagtatatgaatatgtggggaggacataaactagaattccgaacaataggaggaacgttaaatacctcaacacaaggatctactaatacttctattaatcctgtaacattaccgttcacgtctcgagacatctataggactgaatcattggcagggctgaatctatttttaactcaacctgttaatggagtacctagggttgattttcattggaaattcgtcacacatccgatcgcatctgataatttctattatccagggtatgctggaattgggacgcaattacaggattcagaaaatgaattaccacctgaagcaacaggacagccaaattatgaatcttatagtcatagattatctcatataggactcatttcagcatcacatgtgaaagcattggtatattcttggacgcatcgtagtgcagatcgtacgaatacaattcattcagatagtataacacaaataccactggtaaaagcacatacccttcagtcaggtactactgttgtaaaagggccagggtttacaggtggagatatcctccgacgaactagtggaggaccatttgcttttagtaatgttaatttagactggaacttgtcacaaagatatcgtgctagaatacgctatgcttctactactaatctaagaatgtacgtaacgattgcaggggaacgaatttttgctggtcaatttaataaaacaatgaatactggtgatccattaacattccaatcttttagttacgcaactattgatacagcatttacattcccaacgaaagcgagcagcttgactgtaggtgctgatacttttagctcaggtaatgaagtttatgtagatagatttgaattgatcccagttactgcaacacttgaggcagtaactgatttagaaagagcgcagaaggcggttcatgaactgtttacatctacgaatccgggaggattaaaaacggatgtaaaggattatcatattgaccaggtatcaaatttagtagagtctctatcagataaattctatcttgatgaaaagagagaattattcgagatagttaaatacgcgaagcaactccatattgagcgtaacatgtag

SEQ ID NO: 2 - DNA, 1725 bp, Artificial sequence
  Synthetic polynucleotide or polypeptide
atggtggcagaaattagtttggggctcacgcgttttctgttggagaatcttttcccaggtgcaacttttggatttggtttattcgatattatttgggggatttttgggcctgatcaatggagtatgtttcttgaacaaattgaacaactaattgaccagagaatagagacagtcgaaaggaatagggcaattcaaacattaattgggttatcaaatagttatgatgtatatattgaagcgttaaaagaatgggaaaataatcctgataattcagcttcacaagaaagagtacgtaatcgctttcggacaactgacgatgctttgataactggcattcctcttttagccattccgaattttgaaatagctactttatcggtgtatgttcaagctgccaatctacatttatccttattaagggatgcagtgtttttcggagaaagatggggattaacacaaataaatgtagatgacttgtacaggagattaacgaataatatcagaaactattcagatcattgtgcacgatggtataatgaaggattagataatatttctggtttatctcgatctattaacttccaaagagaagtaacaatctctgtcttagatattgttgcgcttttcccgaactatgacatccgaacatatccaatttcaacaacaagccaattaacaagggagatattcacatctccaattgttgtccctaatgattttagtgtagcctacgagggggtaaggagagcgccacacctatttgaatttttagagaaacttgttatttataccggtgatcgaagtgggattcgccattgggcgggacatgaaataacttctagacgtactgattcataccacggtataattcgttaccctctttatggaacagcagcaaatgcagaaagtccatatactcttgcccttcaaccttctgaaagtatttatagaacgttatcagaacctatattttcacaaactggtgggctgtctcctcatagaaggagagtagtagagggagtagagttctctattgtaaataataacgtaaatccttcgtcatttgtatatagaagaaagggttcgttagattcttttactgagttaccacctgaagatgaaagtgtaccaccttatattggctacagtcatcaattatgccatgttggatttggtcgtacaaatgtaatctttgaaccaagtaatttcgctagggttccagtattctcctggacacatcgtagtgcaacccctacaaatacaattgatccagatagaattacccaaataccttcagtgaaggcgagttctcttcgtaattctactgttgttagtggaccaggatttactggaggggatattgttcgaatgggagcagtgcaccaaatatatgcaacggatttaagtatgaatgttcgacctagtgttgcattgagcagatatcttataagacttcgctatgcttgtagggggagttcaaacatagttatacacggtccttctattagatttgtatcgctcccaagtacaatgagtaatgatgaacctttaacatatcaatcatttagatacgcaagtatcacaactccaattacccgtccaatatataacatgtttaatttatctatatccagaatttcaggtgtccaaaatttgtttatagatcgaatagaattcattccagtagatgcaaacttcgaagcagaacgagatttagagagataa

SEQ ID NO: 3 - DNA, 2550 bp, Artificial sequence
  Synthetic polynucleotide or polypeptide
atgaagctaaatctaaaaatttttatagcattattaacaatacctattttaatattaagttttaattttaatactgtttcagcagtaacaaacttaacaagtattcaaacaacatcgtctaatttagaggatttaagtaaagatgaaacagatctctcaatagaaaatttcacagttaatgaaagcgaaaatattagtgaagattcaaagggaaaaaatactgtgggaaaagaagacaaaaaagaagttgattttgcagggagaaatcaggaatttttgaatattgaagataattttgagatcccaagcaatgcaaattctattgctgttgatgatacggttcatgtaacaaaaaatgaaaccgaccagttaggagcaatttggtctaaaaaacagcttgatatgactcaaaattggaaaactgaaatgagggtagaatttaatgcattagatataaaagatatggcagatggtttggcgtttgttcttcataatgactcgcgaggaactagcgcaatcggtagtagagggcagtctataggagtttggaagactagtcgtacaggagtggggcaaaattatattaagaacggatggggtattgaatttgacttttattacaatggtgatggtttagatgctaatattcctccaaaatccggatatatacatatggcaaatgcaatgactgatacagatttagaagggaaaggtatgatacatcaaaacctacaacatatttccaatagcactatgttgggtcaacataaatttgaaattcagtggaatgcaacattaaaaaatctcacatatcgattttttaatgttgcaggtaatgcatactggcagaaggatgtacgtattgatcccatgcttgtgtttggtagtaacttggtctattggggtttcactggtgccacaggtaaaaaagtaatgcatcaaactgttaaatttaaatcaattccccaaacaatccaagctagccccaaaagaaaaacatttgttttaggggataaaattaatataacaaataagaatataaatgatttttttacaattgaaagtggggatgatgtaaaattaaaaaattcatcttattcattctttgcaaatatcgttggtgaaaatcaaagtattcatgtaactttaattgacaagtatgccaatgaaaaagaatatgttattcctgtcaaagttatttggggaaattcgattttattaaaaggtgacaacgactattcaataggggcttttacattggaacatgatgggaagacaaactatataacttctgcagagggaataactcgtggagatgaaaatggtaaggtacattcttactttgctgaaaacctgtattattggattggacgtaaaattccaaatcaaagcatacaaaacctcagtgatataaaaacagatattattattaaagcactaggaaatgatattgcaaaagaaaaaattaactcttttggtactggtacacaacgattggatgtaaattcaggtgacataattgaagtatggcatgcagaatcagggaaaagaaatgttttaatggtgaatgaagaagaaactgaacagcatgtaggattaaaaattgtttattatgaaatatcaagagctacatttatacccttacatattaatcagctaacgccaaaaatagtaaatattaaaaatggaacttcgaatcaagagttaatgaaaaagttagaggaaagcgtggatttaaaagggtatgaaaatattaaggttgaacgttttaaggataaacttccagacacaatgaaagatggagaacaattaatagatgttgtggtaagtgaaacattacagtcagggaaaaaagtagaatatatttatactgttacgtttattgttaatcccgttgtaacagagaatatttatagtagtgacggaacgttgttagatacaatacaatcggaactaaaatatggaatagaatctttttcccctgaaccgaaaaatcgaattgaatttgatggaatacattacaaatacataggatggttagcaggaaatcaaaaacctggtgaaggtattcctcaaacaggaaaaccaaacactgtaaaagaaacgacaacgttcaattatatatatttggacccaaaaaaattgattaaagttacgattccaatagaaatgatattcttctcaagtgataaagggacaggagatatacaatctaatgattatcatattgaaaatcattccgatgaagcaaatttgaatataaaatttgtgtcaatggaaacaaaggagcacgcgggaatacgattcctaacgcctactgatccaaatccgagtttaggtattgaggaatcaatgcgattaaatttagtagtagatgaaatagaaaaaataaatagtcttaatgaatcaagtgaaattacagaagttggaacattgaacccgaaagacaaattagtgataaaatttacaggaacctattttggaaaaataacaaagaataaaaaaagaacaaaccataatttagtttttaaatttagtacggatgaataa

SEQ ID NO: 4 - DNA, 2094 bp, Artificial sequence
  Synthetic polynucleotide or polypeptide
gtgcctttagattattctaaaattttcaagagagttttacttgcaactactgctactaccctaagtgtgggggtagttacaggctgctcgctgttttcttctgaaaaaaagagcactaaaacggcatcagtatctaaaaagaaaaaggatagtgaaaaagaaaagaaaaaagatgagaagaaagatgaaagtaagaatgaaacgactgaaaatctaaatactaatgattttgatgaaatcattgataatgcaaaacgtagctctgatcaaaatttagccggtatcattgaaaatatcaaaaacaaaaagaaatttgatgacttaacagattcaattgcaaccgcagctataaactcagatcgaaacttagcatcagttattgacggtgataaatcaaataatcgtttttcagatttaaatacttcaattgcatcagcaacaaacaatccttctgtctcggataataaggatagtaagaactttgtatttggtggcgatctaaatattaatgatggtgtggctattgcagataactcaatacctccaattaataataataaaaagccacctacttctagtgacactagtggcggggaagtgaaaccgccaacaggtggtaaaggtaataatggaggtggtacaaaaccaccaacaggcggagatgataacgatggtggaggcggtacaaaaccaccaacaggcggagatggtaacgatggtggaggcggtacaaaaccaccaacaggtggagataatgatggtggtggtacaacaaaaccagaaaaggatacagtggcaccagtaataacagcgaagcaaggtgtaactgtatatgtaggagatagcttaaatacaagggatttggtagacgtaagagataataaagatccaaatccagtagtatcgatgggagagtacgatacaagtaaagcaggagaaatccaagtaacagtaacggcaacagatgcatcaggaaatagctcaagtacaacagtaaccgttaacgtagtcgaaaaagaggaagaaaaagacacagaagcaccagtaataacagcgaagcaaggtgtaaccgtacatgtaggagatagcttaaatgcaggtgatttagtagaggtaaaagataataaagacccaaatccagtagtgacagtaggtgcatatgatacaagcaaggcaggagaaattcaagtaacagtaatggcgacagatgcatcaggaaatagctcaagtacaacagtaactgtcaccgtagtcgagaaagaagaggagaaagatacagaagcaccagtaattacagtaaaagaaggtgtaactgtacatgtaggagatagcttaaatgcaggtgatttagtagaagtaaaagataataaagatccaaacccagtagtaacagtgggagcgtatgatacaagtaagccgggtataatatcagttcaagtaacagcaactgataatgtgggtaatagctcaactgcaacggtaactgtcaccgtagtcgagaaagaagaggagaaagatacagaagcaccagtaattacagtaaaacaaggtgtaaccgtacatgtaggagatagcttaaatgcaggtgatttagtagaagtaaaagataataaagatccaaacccagtagtaacagttggagtgtatgatacaagtaaaccaggtataatatcagttcaagtaacggcaactgataaggcgggtaacagctcaactgcaacggtaacagtaaaagtagtggaaaaggaagaagagaaggatacggaagcaccagtgataacaccaaaacaaggtgtaaccgtacatgtaggggataaattgagtccaggaagtttagtgagtgtaaaagataataaagattcaaatccagtagtaacagtgggagcgtatgatacaagtaagccaggtacaatatcagttcaagtaacggcaactgataaggcaggaaacagctcaactgaaacagtgaatgtggtagttcttgagaaagaaaaaccagaacagaagccaaaacagaaaaatgcaggaacaacttctaaagagcaggataatggattacagcccttcccgaacgagaaagcccctcgcgtttag

SEQ ID NO: 5 - DNA, 1449 bp, Artificial sequence
  Synthetic polynucleotide or polypeptide
atgaacgcaaatggaagaaataatggatggaataataatcagcaaatgtcgaatggatatataaaccaaaatcatggtatttcttgtagttgtggttgccaacaagaaaagtatgggtatgaacaacagcaaaatcataatcaacagaatagtcaatatatgtcgaataactatgaaagtgaaaattataagggatcgtatagttatcaagagaatcaatatgaacaacaacaaaaaaatcaaaatatatatatgcaaaaacatatgtatgaaaatcatacaaattataatgaatatatagaagggcgtagtgtagtagatgatttacctgatgaaagtaaaaattttcaaagaattaaaaatgtaaataataataataatcctactctagttatggatgcgaggaatagttcagtgggggaagcacttgcaaatgcttcctatggttgtccaggttctataccttatcagaatacagtaacgaatcggactgttgaaaataataatacaacacaatattttattttttataaaatggataatggagattttgtaattggaaatcaagggaatagtcgggttttagaatttgtccctagtactcttagttctgatgaaaagatattgatttcaaaaaatgctgatatttatccaccacaaatgtttagtaaagacaatctgcctgaaaataaatttcgattaaaaatgtatgaagatgggattgagtatagtgtacataattgtaatggagctgctaatatacaacaaatttatataggtttccagggatcgtataataatgaatatatgattgaaagtggatcaaaatctcctataaattttccggatttatctgtaaataaacaaccattaccaaaaccaagagaattaactaatttaaatgatcagggtgatattccaaaagcaattcaaggaaaatcattagttccagctataattatagacgatataagcttgccattagaaaacaaaatcaagttaagcccatattatgtgttagagtatacacaaacttggtatccagtagttaatcagattatagacccttatcagtatgctacatggaatgaatacgaagggattacactccatgatcaaatgaatatgaaaaatattacaaacatgacaataggaggaacagtattaggctggggattaaaaatgggtcagaaatcagaattttttagaagaacgattttatcaggattaggtgttgggcaaacttttgttgaggatatgggatttaattctcatggtagtagtaagcttaataataatgaattttcaattagatatataaaatatataaaagctcatcagttaataatgagacgtttagacaaattggatgactcaatagctacatggacaatatacgatataaatgataatgcagaaagaaggtatccagaaaatgcaataatctag

SEQ ID NO: 6 - DNA, 1971 bp, Artificial sequence
  Synthetic polynucleotide or polypeptide
atgaatcaaaattacggtagtaatgaagtggaaatactaaatagtagaaatatgagttgccagccaaggtatccgtttgcgaaggcaccaagttctaaattacacagtatgggctataaagattatatggagaggcgtacaaaaggagtagaaacttatagtggactggatggtcttagaacaagtataagtattgtactaagtcttataagcaacatacctggccctcttgcggtaccggcgaagttcatttcaatcatttttccatttctttggccaagtggttcgcaacaagcgatgtgggaagcatttatgaaagcagcagaggaaatgattaatcaaaaaattgaagcatttgcgcgaaatcaggctattagtaggttaacaggggtacaggatgtcgtaagtttatatcagcgtgatgcgaagaattttaatgactatccaactagtgaacccttaaaaaggcaagtccgagaacaatttatatccactaatacgtttgttacaggttctatgccactctttgcagttggtggtcaagaagtaccattgttaaccacgtatgtagaagcagccaatcttcatcttcttcttttacgtgatgcagtaatgttcggagaaagttgggggatggacccactgactgtggcagggtatcaaagtgaccttaacaccaggatcgctgtgtatacggattattgtgtccgcatttataatcaaggattacagaaagccaaaaccctccaagcaaatgtggatcgtaaatatcgaatgatggaggaatggaatttatttaataaatatcgaagagacatgactctgatggtattagaccttgttgccgtatggcagacctatagtccacagctctatcgaatcggcacccggatagaacttacacgagagatatttaccgatttacgaggaaactctgcaaatataatgcctagtaatggttggacatcagctgatataatggaaggttatataatgccaccgccaagtttgtctacatggttagactacactgacatatggacacaacgtggtactggtgtagcaagtactgagcagtatgctggtgtccaaaatcgatacaaatacacgctggataaccaaatccgtacatctccacttttgggaagaagagaaggtgtgatgcataccgttcttgcctcacccacaattattaatagagtggataatagagtaggtacctctctatatactttcagtttttatcgcgaaggttccgcgtctccatttcaaacttttggtgatacattttcacaatccaattctataaaggaaaatcgaattcctattgagggaaatcaaacacgagctaaccacaggatgtcaagaattagtggtatggaaaatgtactttattattttaattcgaatggtaatgttgtcactactccaaagtatatgttttgtatgggggaaggatggacacacattagtatgagtccagaaaatcgaattctctcggatagcattacccaaattcccgctgtaaaaggaaacgtagtagataacggtgccacagttgtaagaggacctggtagcacaggaggcgaccttgtaaaattacctgcatataatcagcaatggacacaattacgtgttaaagtaagaccgtccactactgccaaaacaagacgatatatcgtacgcatacgatatgctagtgaagcgaatgcaaatctatttgtagggaagtatgtggatgcggcaaatagatggtatgagactggaaactatgctgttaatcaaacgttttctggcaatatgacctataacgctttccaatacttggatacaatcagttttctagcaaatgaagaagaattcaagatagaactacgttgtaatagtggaggccctatctacatcgataaaatcgaattttttccggtaaatccaataccagagccactagtaacagaaggtacctattaa

SEQ ID NO: 7 - DNA, 3627 bp, Artificial sequence
  Synthetic polynucleotide or polypeptide
atgactcaactaactggttcgattcgtttttatgtggtccctcaaagtttttcatttataccagaaattacagttaatgatgtagcctatcaattacattttggagaaacttgtactattaacggagttccaattggatctccattattacaagccaaaagtattattatagctaattataaatatgtagcaacattcagtccagctactgtagagattaagcctgatactatttcgcgagttatgatttcttttaatagatttgaaataaccgatgatacagatggagagggagttccaaatgagttagaaatgaatggttacggatggaatcctgaaacatcggaattcgaatattacgatccaataaaacatatagaaaaatttcgaacgaatccacttgttaggagtacatgtggtgacccatatacagattctaggaaagccagtaaaaaaaatcttagtcatgtgagaccaccatataatcatccttgggttgctgcatatccaattattaaagccattttaattgactatacaataacaccaaaggcagaaattatagattcgcaggggaatagaaggagtacttgctttacaaatcgtgttacacaatcagatgttcagccgcaggggaaagattttgagaattcaattgaattgtgtttcagtaaaacgaatcctcaaattaggacaagtcttacgattggagaattaaattcatacgcatgggaaaccgaatcagtcagacatataaattttgaggaaagattcaattggaaaacagcaaatacaattaataaagaaaaagcggcaagtatttcattcaatatacaatttttgaacgaaggtgccctgtatgcaacaaatatcataccaacctttaatattttaattgggggacaagtcatacaaaggcatactatttcaaaccctattccttctttagatgttggagcacattcacacctttttaaagtaggaaatggtgacgatatttcattgacactagagcaattaagggcaattcaattaggtgctccgattacactagaagtattacaagtaaatgcagagattagagaattcgaagaaaaaaataatagctggaaaatcatcgcccaatggccggaattagaggtttacgatataaatcaaaagacagctgtatttgtttatatagatagaaatggcaaaaaaactgaatatcgggtagctgcacgaccaatcgttccaggattatatgacttaaaaacaactttaggtgatatcttacaaattgtactaagagatcaaattcaaaaaacgtctgaaggtatatatataaatggatttaaattagataacaattggatttattattctaatcatgttgacagaattcacaactttattgacgaaattggcccaggtggctactttttaaatttaccggtttatatagatgatattatcctgttaaaagagccttctggaaaaaaagaacctagaattttatttgctgaatttaccaaggattataaaaagataaaagcttcaattgtaccaggtctgtatggaattcgatcaattgaagcagaaattagaatgaacaatgtgattcagaaagtaccacttattgcattatctaaaggtgcttattgttttgaaacggacttattggtggattctgcagatattaattttttggggacgttatatgtatatgattatcaggcaacaatatatcaacaagaaattacaacgagccttgaaaaagaaggttatgtgtatcaacctttgacttttccacaagttcttttagatggaactttacaatccgtatctcgtgtttcaactttgaatcaacgtaaaggaagtattaatctaaatgtagataagttagctgtgaaaggaaagtcatatatatttcaggttgaatctcatagatggagttccccagaaattaaggttacaattggaaatcaaatcgtacagctaggatgtgatgattatcgtccaaatcgatatgaaatgcaatttcaatttagtgatggaaggccctctgcaacacatttctttgaaggatgtagaatgtatgaatttcctatcctgcctactgatataccaggaaaaaaaattaaaaaaattaaacaagtaaatactccagagtttataggtaatgattttaatggtgctcaaatgactgtattaagacgtttaaatgctaatactgataagggattacatcatactaaaatgagtgttaatggaaatattatattcgaaaattttaacggtaaagatgtctcagaagaaatcctttcttttacaacttgcggtgtgactaaaatgaaagaaaggcataatgaagacgtacgaattagaattcatggtaataatggaactatttatgattttgatgcaactaaatatttctgtgatagtaccataataaataattttgaagatggtattacatttattgaacttataggagaacgccctattcttctaagagttgaccaaaatctaggcttggatagaaagcaaaaatatttatttatggacccttactataataaaaaatataatttaaaggattggggattattaaatcaagatattaagagagaaagagtttctatatcagggtggcctgtatgtgattttccatatcttcaaagaggtgcaatctcctctccagttgtctcacgaacaatcatagtgacttttcccgatgatactgtagatgttccgattgaatgggaaatcggaagagaaaagaatgattatgcaagaataacaagaaacagtgaaacacaaagaacagaacaaataaatgcatttttaaaagtgaaattattaggagcttttacagacgatgaaacaagtggtaggaaattcactgaacttgggcatctaaataatcagccagttattatacctattacctcagatcaattgattcataatacatgcatcccgttacccaatgagcatgctgaagcctatctaataagaatagagagtaaaggaattagtagtgatgagattaaagtaatgatgggtcatgagttcgaatgctatttaggttcatcagattataatatgaataaagatactgtagaggagaaaagcgagttggaatccccccttcgtagtgagttactatttatacccgtatctaaaaatagtaaccaacttaatatactcatacaactttcatctttcagccaagtagcacttgatggtggcgagatccgtatctactttctaggttacttttctcatacatcaaagctcaaattcattccatattctctacagacaatacaagaccaatttataattaatcatgttccatatcacaatattaaagcccaccttatgcaatttacagtaaatggtggatatgatcacaatacgaatattcttatgaactctgatgaatatcatataaatcgtacgtatatcgggatttctgatggaactcaattaaaaaaagaagttaaaccggaatattgtatatactctgggcttggatatgggatttcaagtccagaacaaagaaataaagtaagcctatccgtagagggtactaatataccttatataaatactaattatattggttattttcattag

SEQ ID NO: 8 - DNA, 1545 bp, Artificial sequence
  Synthetic polynucleotide or polypeptide
atggctccaaaaagaaggaatcgttgccgtacccctattatagaaaacttctcgatagaaaggtacgaaaaaatattattaccttcttatgcagttgctgcgaatcttcatttgctgttattacgtgacattgaaattcatggaaaaaaattaggttttgctcaagattctctaaatttttataattgtgaattaaaatattatacggcacagcatacgaaatattgcctagatacttacaataaaggtttggcttcagaaaaagaaaaaagttgggtgcgtttccatcgatatcgtagagaaatgactttggctgtattagatataattgcattattcccactttatgatgcaagactatatccttctaaggatagtaaaatacaagtcaaatccgaattgacgagagaaatttattcagatgtcgttaatgctaatgtgtacgggactatatatactgataataatagaaacgaagaactttatacacgaccacctcatttatttacttggttacgaggatttagatttgtaaccaattctatttcttcaggttctagaacttggacatttttagctggtaatcaaaataaatattcttatacccgcggcaatggtattattcctggacctttttatgggcaggacacagattatggtggaacctcttctaatacagattttgcagcaggttcctatgtttataatttatggacaaaaaactatgagtttatttctccatatactgatccagtaaatattacaaaaattaatttttctgtaacgaataataactcctcaaaagaagaaatttatggtgcggaaagaaatctacctactgtccgaacagattttgattttcttacaaataaagaaggaactggctcaccgacatacaataattacaatcatattttatcatatatgttaacaaatggaacatttagtcaaaaaagacacggttatacatttgcatttacgcatagtagcgttgatccttataacaccattgccccagataaaattacgcaaattccggctgtaaaagggaactatcttctaggtacatatgttcggaaaggtcccggtcatacaggcggagatcttgtttcaatgattagtaccaatcgtttagggatagatgtttatttccctaaaccactagactatcgtatacgtatacgctattcaacaagtagtaatggttatctatatatttattcacctaacagttcaatggtgtatctcccgccaacaacccttgtaggtggtcaaccaacttttgatccaatggacttcggtgcattcagagttgtagaagttccagttaaatttcgtgcaagtgctgcgggctatacaaactttactattgattcaagttttggcccagtatatattgataaaatagaatttatcccggatagtatcccaattgataaatgtacgaaatgtcaatacgtaggagaagaatgtacatgtagttgtccagcattacaatccttagacacagaaaaagaaattgtcaatagtttatttatcgaataa

SEQ ID NO: 9 - DNA, 678 bp, Artificial sequence
  Synthetic polynucleotide or polypeptide
atgcaacaacgtcaattgtttgatttacatgaaggagattgtatctatgtgtattctggtggaaatttagaagcacaaggtagatatataagtgttgtggaagataaaaatgaattatttctatgttggagaaagcataatggaaatgaaatatatacaaatttgaatggaattagtgtagaaacgatgaatgaaaatacagcatatctacaaaactcaagggatacgtgtgcgcgagggtatacggataatcaaaatacaagtagtacgtatgatcaaggatataacaataattatgggcaaaattataacaactataaccagaacgctaatgatatgtataatcaaggatataataacacctataatcaagatgctagtcatgtatatgacccagaatacaacaataattacaatcaacattctagttgcacatgtaatcaagggtatgatacttacgaacagaatgctagtagtacgtatgatcaaagatacaacaattacgaccaatacatggggaatacatatcaaccaagctatgacaatgataatcagaactccagcagtacgtatagcaaaaatactagtgatagttatgatcaaagctataacaataactataaccagagctctggctgtacgtgtaatcaaggatataacaataactatcctaaataa

SEQ ID NO: 10 - DNA, 1554 bp, Artificial sequence
  Synthetic polynucleotide or polypeptide
atgaatttagatcaacaaaaatatggacagaacaatgaatataggcatcaaaatcatagtgtatcttgtgattgtggttatcaacaaggtaaatatgaatacgagcaaaaacaaaaaaataaagaatataacaatcaatatatattaaatgaacaaatgtaccaaaattatgatgggtcttgtagttataatcaaggaatggggtatcctgtagcaaatgaggtaacgcgaaatgacatgtatggttctttaaaaaaagaatttagggaatataatatgcgtcacgaaaataaaaattattatagctgtagtccaagacagtttaatacacttaatttacctgaagaaagtcaaagattccaaacaattaccactagtctttcaactgctaatcgaggattagatgctttacgaactcaggtggatcagcaattaggtattggtttaccacctaattgtaggaacgtagtcgtacaaaatcaagtgacaaacgattatgtacacggagatggaaatcgacaacgatttattttttatagtacggatggtggcggatttgtaatagctaatcagcaatatggagaagttttagcatatgtagataccggcgcatcaatagttactcagttatacaatgggaattctagacaaattttcaggaaaattaacgcttcaaccgataagtttagattaataaatgagggtagagcgatagtcccatgcggaaatcccaataactgggatagatttataggatatacacttgaaaataatgacactgaattattttatcatcagacagctgaaaatgtatcaataactattccttcattatcaactccaactgagttaggtccagttccagaattaaccgggttgaatgattcaggtctacctccagaaagagcaataagagctgttataggaagtgcattaataccatgtatatttgtaaatgatgtaattccactagataaaagaatacaagaaagtccttattataaattagaatatagacaatattggcatagattatggtcatatcagattccttcttttgatagaaaaccagtcacagaaataacagggatattagtggatgcgcaagaaaatataagaaacacgatagatatgtcaataggtgctgattggaatttaagatttggtaatagttcaacaccgtttattcaacagattttatccggtttgaattctgtacgttcttttagtagtacgaatttaggtgaacgtaccaattcttcaatatacgaaaataacaattcgcaaccagttaggtatagcaaatttgcaagagcatatgaatatagattaacacgttctgatggaacacacgtaggaacatgggtagccgtagataatagaagtatgtatatgtcaacattccctcataatatgcgagtatctctacaagaggataaattaataagaagtgattctagttatgatttatcagtatggaaaacaccaatggtaataaaagatggtgaaattaaaacaaaaaataaacataattcaaaaccatacaatgagtga

SEQ ID NO: 11 - DNA, 804 bp, Artificial sequence
  Synthetic polynucleotide or polypeptide
atgaacgcaaatgtaacagatattattgaattatttactagatatgcggatatgtggagtaaacaacaaggaggggggaatagtagaatatctcttagactaccagggtttgaacatcttgcatttaccagtttcacacatatgacaaaataccatactcctacagaacaaacagtccctgatgcaaaagttgccgctcatacctacacgaatgaaggggaagaaccgatgaatattaccatagaactagatggcgaattgaaaaaatggattcaacttatagctgctgaaggggcaagtgaagctggaaaacgtcttctggacattaatcttccgaatgatattccgctacttttaacgaacgtccccttgccgataggaggagatattcttactttttcagatatgcagtcttggggtgttaaacatccatataccattgaccctggagataaagtaacagcaactctaatggtaaagcaaaagaaaatgaagcgactattcgagataccaagaacgttatcaaggtatataggtatttacacatctaatcccatcaggcaacaccttatatcgttacatcatgtgtctagtattttaaaaaactactatagtccctatattcaagtgaaaggtcgtaacgtaaccgttacagataaaggtgaactcgaggctctatatggatttgaacaatatattcatattcaaaagcagagaatcgataatccgaatgtagcagaggagtttaatatttataatccacaaacatccccggcgaatgttatatatgatcaagagatttaa

SEQ ID NO: 12 - DNA, 1368 bp, Artificial sequence
  Synthetic polynucleotide or polypeptide
atgaaacaaatccacaatggatcttgttcttgtagttgtcagcaaagatcatttgataatgcacctgaaaaaaatggcgttgagattaataattctgtacaatatgatatgaatggtttacagtctacctataatggaattaatagttgtgtacccccggtattaaatttgcctgttgaaagtactatatttcaaacgataaacgcaggaggtagttcgaataatgtatgtttagattcttggaatgttcgagctggaactgatttgaggaatggtttaaccaatagggcttgtcggatagtacctaatgattatcaagtacttattgctccctttaataacaatgtcgacacacaattttttctattttatgcattagatgatgggaattttataatagcaagtttggatcatggacgtgtttttgataagggagacaatgatgatagtattgtagcaagattatatacgggtagtaataatcagagatttactaaaattagaacttcaggaaataattttattttaaggagaaatggaagaatggtgggtgggtgtgatggtggtgtgttcctaaataacaattctgtagcagatactctttctttcaatacaacactcaatagtcctactgcaagacttataaatgacttaagattatcttgtttaacatcattaaatccattgccacaattaacgggatttaatgattcaggaccatctccaaacgaagcaccaagagcaatcagaggtagttggcttatcccttgtatatttataaatgatgtaatcccattaaggaacagaattaaacagagcccttattatatattagaatatagagaatattggcacaggttatggtcggaaattttacaaagtggcggtgtgacaacaggtgtagagacaaccggaatagacgataacgcgcaatcggatatgagagatacagtagatataacgataggtgcagattggaatttaagattttgggatctttcaacaccatttagacaacaaattttatcggggttaaatttgttaaattcaacttctaatacaaatttaggatcaacagagaatatgtaccgatatgtaaatttcaatcctcaacaagttagatattcaaggttttcaaagggatatgaatatcaattaagacgcttagatggaacaatagtaagaacatggcgagcgattgataatagaagtatgtatctaaagacatttccggttaatatgggactcgaattaacagagacaaaaataataagtgcggataatagttatgatttatctacatggaaaacaccaatgaaaataagagatggtgaaatcaagacaaaaaacaaaaattgtgtgttgtaa

SEQ ID NO: 13 - DNA, 2289 bp, Artificial sequence
  Synthetic polynucleotide or polypeptide
atgtataacattgaaattctaataagaactggaggaatatccgtgaatcacgataattataataatgaatgtgaaattattgatttgcatacttcatcttattcttcagatagaaacagttatgattctaaatatccttacaaagataatccaaatcaaccattgtcaaatacaaattacaaagactggttaactatgtgtcaagggaatcaacaatatagtgataatttcgaaacattggctactcctgatacaatcgctgcagttagtgcaggtactattgttacaggaactatgatagcaggtataggtggactcactgctctatccggacctataggactattcggtgctataataatatcttttggtaccctaatccctatcctttggccgggtcaagaaacagaaccaaacaaaacagtctggacacaatttattaaaattggagaaagatttgctagccaggaattaacagacgctcaattagaggataaaatacgagaattaaatggaatcagacaggtattaaaaagctatgatgaagggtttaacgattggataagattaaaaaaactacaagctcctggattaccaccatcatcagcattacaacaagctgcccttactcttaaaatacgatttgagaatgctcatgccaatctattagataaactagagctattcaaaaatcaatattttgcactactattattacctacttttgcgcaagctgccaattttcatttaaatttactacaacaaggtgctgaattggctgatgaatggaatacagatatacatccttcacaaattgaacctaatgctggaacatcagaggactattataaacttttaaaagaaaatatagctaaatatagtaactattgtgcaaatacctatagagaaggactaaataaacttagaaacgaacctaatataagatggagtatatttaatgattatcgaagatatatgactattactgtattagatacaatttctttattttctttattcgatataaaaaaatatagagattcaataggaggaatagaagtaaaaggcattaacaatgaactcacaagagaaatttatacagctgaaataaattttgaccgtcttacttcccctgaaaaacaacccgatctcactacgatggaatatcgattaacacgttcaggtaaattattttcatttttagatgaatttctattttatacacaaaattcaacatacgtaaattatttagttggtattgcaaatcgtagtagatatactaatgctacgacaggaattgaagttatatatggagaaagaacaggtccagccacaaccaaaacaataagaccatttgaatcctataaagtttcaattataactgatagacgagcagcttctgattccgcttttactcacatagcctttataattaatcaaattgaactttatttaaatggatcatctagtaataaattaatatattcagctggggggaatttatctaatgataaaaaaacaactgattttcaatttcctgtaaaaaaagactgtaaacaaattactgatccaaattgtttaccaagctataatagttatagtcatattttatcaaatttttctttatttaattattcctatcaaattggattaacgataagtagcttatatacaggtgcattaggatggacacacagtagtgttaatagaactaatgcaatatcagataaaataattacaatgatcccagcagtcaaaggtaactatcttgatacaaactctaaggtaattgaaggacctggtcatacaggaggaaacttagtttatttacaaattcaaaaccgtttagaaattacatgtagaactcctaattctacacaaccttattacattagacttcgatatgctacaaatggtgctggaaatactcttcctaatatatctcttacaataccaacagtaacagcaataccacctcaacgactcaataatactttttctagtacaaattataataatttacaatatgaaaactttgggtatttccaatttccaggtacaataacaataccttcaaatcgaaacatacaaattcaatttaatcgtgcagatgtatcaaattcaattttaatcattgataaaattgaatttataccaattacttcctctatgcaccaaaatagagaaaaacaaaaattagaaactgtccaaacaaaaataaatacatttttcacaaatcatacaaaaaacactttaaatataaaaaatacaaactatgatattgattaa

SEQ ID NO: 14 - DNA, 2307 bp, Artificial sequence
  Synthetic polynucleotide or polypeptide
atgaatcccaataacgaaaatattgaatgtgaaattattgattcccatacttcaccttattcttcgaaaaaaaacagtaatgattccagatatccttacacaaataatccaaatcaaccattgtcaaatacaaattacaaagattggttaactatgtgtcaagggaatcaacaatataatgataattatgaaacttttgctagtgctgatacaattgccgcagttagtgcaagtactattgtaaccggtactatgttagccggcctaggtgcgttcactgctatatccggacctataggactaataggttcggtaataatatcctttggtactctactccctatcttttggctagcaggagcgcaagaaaaaaaaatctggacacaatttattagaatcggagaaaaatttgctagtcaagaattaacagacgcacaattagaagataaaatacgagtattaaatggattcaaacaagtattagaaagctacgaagatggattacaagattggataagattaaaaaagctacaaactcctggattagcaccatcattagaattaaaaaatgctgcccatactcttaaattgcgatttgagattgctcatgcgaattttttacaaaacctagagggattcaaaaatgcatattttgcaacactattactccctacttttgcccaagccgctcagtttcatttgaatttattacaacaaggtgttgaatttgctgatcaatggaatgcagatatatttcctacacaaattgaacctaatgctggaacatcagagagctattatacacttttaaaaaaatatatacctatatatagtaactattgtgcaaatacctatagagacggattaaacaaactcaaaaccgaacctaatatgaaatggagtatatttaatgactatcgaagatatatgactatttctgtattagatactatcgctcaattttctttttatgatataaagcgatacaaagattcgataggaagaataggtggcattaaaactgaactcacaagagaaatttatacaactgaaataaattttgatcgtcttcctgaacttagatttcaacccaatctcgctacgatggaaaataatttaacacgtgcaaggtttacattattttcatttttagaacgattgattttttatacagaaaatgcaactttcggaaatcgtttagttggtattgcaaatcgtgatgcacctacttatagtaatactataactgaaactttatatggaaagagaacagctttaatcaacacgcaaattttacatccatttgaagcttataaagtatcaattttaactgatagacaatcacctcctgtttcgcctattcaaccacactttataattaatcaaattgcactttatttaaatggcttctctaacaatacactcagatattcagcaggaggagatttatctaatgattatcaaaacacaactatttttcaactttctacaaaaaaagactgcaatctaattactgatccaagttgttcaccaaactttaataattatagtcatattttatcccatttttctttatttacttattcctatacgattggattacagctacaaatattagatacaggtgcattaggatggacacacagtagtgttgatagatataatgcgatatcagataaaataattacaatgatcccagcaatcaaagctaactatcttgatacaaactctaaggtaattgaaggacctggtcatacaggaggaaacttagtttatttccaaagtcaaggacgtttagatattacatgtgaaactcctaattctacacaatcttatattattagacttcgatatgctacaaatggttctgaaaatactcttcctaatatatctcttacaataccaggagtaataggaataacacctcgacaactcaaaaacactttttctggtgcaaattacaataatttacaatatgaaaattttgaatgtttccaatttcaaggtacaataacattaccttcaaatcgaaacttaacatttatatttaatcgtgtagatttatcaaattcaattttaatcattgataaaattgaatttataccaattacttcttctgtaatccaaaatatagaaaaacaaaaattagaaactatccaaaaaaaaataaacacatttttcacaaatcatacaaaaaatactttgaatatagaaactacagactatgatattgatcaaactgcaatccaagtagaatccttatcaaaagaactatatccacaagaaaaaagaaatagtaatttttaa

SEQ ID NO: 15 - DNA, 2100 bp, Artificial sequence
  Synthetic polynucleotide or polypeptide
atgaatcacaataacaataataataaatatgaaattattgattcgcatgcatcaccttatccttcgaacaaaaacagtaatcattctagatacccttatacaaataatacaaattacaaagattggctcaatatatgtcaacagaatcaacagtatgatgagggttttgaaacatttgagagtgctgatacaattgccgcagttagtgcaggtattattgtagcgggcactatgttatcagcttttacttcccctctaggtcctgcccttattatatctttcggaacattacttccaattttttggaaaccgggtgaagatcctaaaacagtatggaaagcttttgtaaaaattggatatcgaccttttggtttaccagtagatgaagctatcgttaatctactatataataaagtggatgccttaaaaactcaatttgaagactatcaaagatattttgatatatggaaagcaaatcccacttcacaaaatgctgatgcagtgaaaaacaaattccttactttagatactcttgttataggaacattacaagaattaaaaaaagactatgctataatattacttcctggttatacacaaatagctaattggcacttaaatttattacgacaagccgcagataattatgacaaatgggcaccttcatctaacttatcaatacaaagtatatatcctcaagattatattagcgatcttaatacttgcttaacgaattgctcaacagaaagtaataataaggtatcttctaaatattataaatgcatattaaaatgtagaattgcagaatatattaatcattgttcagaaaaatatcaagatggcttaaatcagcttaaaaattcaagtaatataaattgggacatatataatgcgtatcgtagagaaatgacttttactgtattagatcatattgccatttttccaaattatgacccagaaaaatatccaacaggtactcactcagaacttactagagaaatttatactgatgctgtcatgagaagatatgaaactggtagcccaatacctattgctcaaagagaacaggaattaacaagatctccacatttattctctcgcctaaataaatttactctatttacagctaaaaatattttaccaggattacatgctgttcaaaaccattttagctatacaaatgatagtactgtccgccttagtccaatttataaaccagaaaatttatcggagccaaatacagataaccctcctccatttgatatttcgaataccgctgttcgtagtatagcagtcaaacgtcggtatgagtattatcatataactgctatagattttgatacaatagatggaaatccacgtaggtacaattctggatatacacctgaaaatttaggcatagattattttatattcacagaattcccagcaggtaaaattcctccttatggtcttggtactaagtatactcatatcttatcttatataaaaattagtcctcgaggcaacctatcattaccagctgaaagagaattatcattcgcttggacacatacaagtgttaatttcaacaatacaatttctaatacaataactacacaaatccctgctgtaaaagctaagtctttagatccatcatcttctgttatatcaggtcctggtcatacaggaggtgatttagtttctcttaggagtagtatgcaaattatgtgttatgtcccaactgcggcaagataccaaattcgtatgcgatgtgttgcatattctcctaatcgttcaattaacctaacattaaatatagcaggcgtaacaaattatagtctccgagcactaggtataggttccataaaaaatataataaatcctaaatatgatgattttcaatatatatattttcaaaccgaagaccctcaacaagtagcaacagtaaacttatcctccaattttaccatgtttttaaactcaaacgattttgctgataatacaatacttatagataaattcgaattcatcccaatcactaacacattagaagaaaacttagaaacacaaaaattagaaaaaatccaacaaacagtaaatacactttttaccaattaa

SEQ ID NO: 16 - DNA, 3468 bp, Artificial sequence
  Synthetic polynucleotide or polypeptide
atgaatcgaaataatcaagatgaatatgaaattattgacgcttccacttgtggttgttcgtcagatgatgttgttcaataccctttggcaagagatccgaatgctgtattccaaaatatgcattataaagattatttgcaaacgtatgatggagactatacaggttctcttataaatcctaacttatctattaatcctagagatgtactgcaaactggaattaatattgtgggaagattactaggatttctaggtgttccatttgctggtcagttagttactttctatacctttcttttaaatcaactgtggccaacaaatgataatgcagtatgggaagcttttatggcacaaatagaagagcttattaatcaaagaatatccgaagcagtagtagggacagcagcggatcatttaacgggattacacgataattatgagttatatgtagaggcattggaggaatggctggaaagaccgaatgctgctagaactaatctactttttaatagatttaccaccctagatagtctttttacacaatttatgccaagctttggtactggacctggaagtcaaaactacgcagttccattacttacagtatacgcacaagcagcgaaccttcatttgttattattaaaggatgctgaaatatatggagcaagatggggactgaaccaaaatcagattaactcattccatacgcgccaacaagaacgtactcaatattatacaaatcattgcgtaacgacgtataataccggtttagatagattaagaggcacaaatactgaaagttggttaaattatcatcgtttccgtagagagatgacattaatggcaatggatttagtagcgctattcccatattataatgtacgacaatatccaaatggagcaaatcctcagcttacacgtgaaatatatacagatccaattgtatttaatccaccagctaatgtgggattatgtagacgttggggcaataacccatataatagattttctgaactagaaaacgcttttatccgcccgccacatctttttgatagattgaataccttaacaattagtagaaatagatttgacgttgggtcaaactttatagaaccgtggtctggacatacgttacgccgtagttattcgaataattcgacagtatatgaagatagttatggccaaattacagccacaagaacaacaattaatctgccggctaatggaactggccgagtagaatcaacagcagtagattttcgtagcgcgcttgtggggatatacggtgttaatagagcttcttttattccaggtggtgtgtttagtggcacgactcagccttctactggaggatgtagagatttgtatgattcaagtgatgaattaccaccagacgaaagtactggaagttttgcccatagactatctcatgttacctttttaagttttacaactaatcaggccggttccatagccaattcaggacgcgtccctacttatgtctggacccatcgcgatgtggactttaataatacaattaaccccaatagaattactcaaataccagtggtaaaggcatatgagctaagtagtggtgctactgtcgtgaaaggtccaggattcacaggaggagatgtaatccgaagaacaaatattggtgggttcggagcaataagggtgtcggtcactggaccgctaacacaacgatatcgcataaggttccgttatgcttcgacaatagattttgatttctttgtaacacgtggaggaactactataaataattttagatttacacgtacaatgaacaggggacaggaatcaagatatgaatcctatcgtactgtagagtttacaactccttttaactttacacaaagtcaagatataattcgaacatctatccagggacttagtggaaatggggaagtataccttgatagaattgaaatcatccctgtaaatccaacacgagaagcggaagaggatctagaagcagcgaagaaagcggtggcgagcttgtttacacgtacaagggacggattacaagtaaatgtgacagattatcaagtcgatcaagcggcaaatttagtgtcatgcttatcagatgaacaatatgggcatgacaaaaagatgttattggaagcggtaagagcggcaaaacgcctcagccgagaacgcaacttacttcaagatccagattttaatacaatcaatagtacagaagaaaatggatggaaagcaagtaacggcgttactattagcgagggcggtccattctataaaggccgtgcgcttcagctagcaagcgcaagagaaaattacccaacatacatttatcaaaaagtaaatgcatcagagttaaagccgtatacacgttatagactggatgggttcgtgaagagtagtcaagatttagaaattgatctcattcaccatcataaagtccatctcgtgaaaaatgtaccagataatttagtatccgatacttactcggatggttcttgcagtggaatgaatcgatgtgaggaacaacagatggtaaatgcgcaactggaaacagaacatcatcatccgatggattgctgtgaagcggctcaaacacatgagttttcttcctatattaatacaggcgatctaaattcaagtgtagatcaaggcatttgggttgtattgaaagttcgaacaaccgatggttatgcgacgctaggaaatcttgaattggtagaggtcggaccgttatcgggtgaatctctagaacgtgaacaaagggataatgcgaaatggagtgcagagctaggaagaaagcgtgcagaaacagatcgcgtgtatcaagatgccaaacaatccatcaatcatttatttgtggattatcaagatcaacaattaaatccagaaatagggatggcagatattattgacgctcaaaatcttgtcgcatcaatttcagatgtgtatagcgatgcagtactgcaaatccctggaattaactatgagatttacacagagctatccaatcgcttacaacaagcatcgtatctgtatacgtctcgaaatgcggtgcaaaatggggactttaacagcggtctagatagttggaatgcaacagggggggctacggtacaacaggatggcaatacgcatttcttagttctttctcattgggatgcacaagtttctcaacaatttagagtgcagccgaattgtaaatatgtattacgtgtaacagcagagaaagtaggcggcggagacggatacgtgacaatccgggatggtgctcatcatacagaaaagcttacatttaatgcatgtgattatgatataaatggcacgtacgtgactgataatacgtatctaacaaaagaagtggtattctattcacatacagaacacatgtgggtagaggtaagtgaaacagaaggtgcatttcatatagatagtattgaattcgttgaaacagaaaagtaa

SEQ ID NO: 17 - DNA, 2463 bp, Artificial sequence
  Synthetic polynucleotide or polypeptide
atgaatcaaaactggaataacaatggctatgaaatactggatagtggtagtgtgtcatgtcagtcaaggtatccttttgcgcaggcaccaggttctgaattacagaatctgaattatcaagatgtgatgaacacgcgtattggaagagcatatcaggaattacaacaagcgaacataaacgaagctgttaatacggctgtaagtgttactgcaacaactcttaccaattctggaacaactcttaccaattctggaacaactcgttctggcgtagctatagcggggcaggcacttgcttcggtttttaaaatcctttggaaagaacgtagaaaacaaactcaatggaagcagttcatgaatgctgtagaatatcttgtaaatcaaaagattctagctgtagtatatgatgacgctatcttacgattagaaggtatagaagaagttttagaattatatatcctagcggctttagactggaatacaaatcccaaggacccagttgctctagaccgtgttagaagacagctttcagctacgaatacgaccatcgcggcttctatgcccttttttcgaaggtctggttatgaggttccattactcactgtatttatacaagcagctaatttgtatttactcttcttacaagatgtagttaatttcggaaaagattgggggatgggctcgaaagaagttgaagactattatgatttgttccaaagacttacaagggagtataccgattattgtgtgaatacgtataatcaaggtatgaatgaagctaaaaaattaatcggaaaacttaatccaaaggactataataaatacccgtacttatacccttattccggtggcagtccatcttataggggagaagagtattattacgggcaagtactcgattggaatgtgatgaatgatttccggagagacatgactcttatggtgttagacctgatatcattatggccaacgtatgaccaaaagcaatattccaatccttatggcgtgaatattcagctatcaagggaagtatattctacagcatacggtaaagttggaaaccaaagagataattgggcagttatcgaaaataggtttgttcgcccgcctcatctcgttacattgctgtcgaacttagaaattaacttggcagtttcaagtgttcgggcgaggaattatgtgggggtaaaaaacacactctcacatatagggtcaactgtgacatgggaggagggatttactaataatagtccttctaatgggtacgtaaatgttccaaccgatttcgttggtggcttgagaataggtcttggtccggttccgtgtagtttgcaatttttgaatttctttgggagccaatttcaaacagttgggcagtgtccgcagccgaacccggaaacggtcttttcaaggatatatacacttgatgagagtatgaatactccttcaaataatccaatagcttctcatcgtttatcttacgtaaatgcgatggatgctattatccactatactggaactaaatctccaccgggattatcaacatggggatttggttgggtgcataacagtttaacgccagaaaatagaatcgtatctgataaaacgactcaaattccagcggtgaagggatatcttgtagatcatggtgctacggttgtaaaagggcctggcagtacaggaggagaccttgtaagattacctgtatataatgatcaatggactcaattgcgtgtactggtaagaccatccttctctgcgaaaacaagaccatataaactacgcattcgatatgcaagtgagggcaatgccagtctatttgtagggaagcatactaattatggttggtacgaaactggaaactatgctgttaaccgaacgttttctggaagtatgacatataactctttcaaatacttggatacatttgagtttggggcaaatgaagaagaatttacaatagagctacgttgcagtagcggtggtcctgtttacatcgacaaacttgaatttattccggtaaatccgattgaagaaacagtacctgatgctggtatatatcagatagttactgctttaaataataatagtgttgtagatatgaatccaggagacaagaatgttcacttatgggcaaatggtaacgctagtaatcaaatgtggagggttgtatatgattccagtaaaaacgcatatcaatttaaaaatatgttggatcagaatctagtattagcttgggatattagaggtttgaatgtgtttgctacacctaaccttcaatatgacgagcagtactggaggattcaagatgccgggaacggatatgtttatttgaagaatacaaaagatctgaataaggtattatatgtatctggttcagggactgcaaatggaacgaatattcaggtatggaattatgacggtagtaatgctcaaaaattcaggtttattagaatgtattaa

SEQ ID NO: 18 - DNA, 3600 bp, Artificial sequence
  Synthetic polynucleotide or polypeptide
atgagtcttggagggacgaacatgaatccatatcataataaaaatgaatatgaaatactagatgtatcatcaagtacatctaacatgtcgaatcagtattcaagataccctttggcaaataatcctcaagcttttatgcgaaatacgaattataaagaatggctagctatgtgtgaggggagtaatggtactttagcctattctggcaccgaagtttttgaaagtataaaaggggcagtgagtagtggaattgctatttctactgctattattgccttcttagggattccgtttgttggagaagcacttggactattaagtgttcttattaatcttctttggaatgaagggaatccatgggaagtgtttatgaataatgtggaagagctgatcagccaaaaaatatcagttgttgtgagagatacagcaatttcaaaattagcaggtttacatgttcaagtagatgcatatcagagggttcttaaatattggaaagaaaatccgaatagtgcagctgctagagaagaagtaaaagataaattcagagctactaatactgcatttgaaggtgcgatgcctcaatttgcaattaatggttatgagacattattattatctgtatatgcacaagctgcgaatcttcatttgcttttattgagagatgctactatttatgggagtgagtggggattagcacgagatgatggtgatttttattacggggaacaattacgatatacacaaatatatgttgctcattgtgtgaagtggtataatgatggtttagaaaaattaagggggacaaatagtttaagttggttgaaattcaatagatatcgtagggatatgaccttgacagtattagatgtaatagcattctttccacattatgatgctcgtatatatccgatgggagtaaaaacagaacttactagagaaatttatacagatccaataggtatagatttgagtaatgatcttacagttcctaattggtttagtggggggatagataaattcgagacggttgaaaattatacccgagcacctcatctttttacttggttaaaaggcattacgatacacacaggtaggataacatatgggaatagatatacggatttttggaaagctcatcgcatagattttggttacaccttgaaccaaaacgtattaagttcttggtatgggaattccacgaatagtctgtctacttataatgaaaattttggggattatgatatttattcacttaaatcaatagctacttcgtatcgagtttttgatccattatctggataccaatatttttttggtgttccccaagttctgtttaattttgtaaatagacttgataatggagtaacacaaacattttctactaatggaggatataattttggagctcaaacaatactttcagaattacctggagaaacattagatcgcccaaattctaaggactatagtcataggttagcctatatcacatgtttagacatagggcataattggccaagattagaaccaaatcgagggcaacttcttctcccttcatggacacataaaagtgtggaccctaacaatacaattgatccaacaaaaatcacacaaattccagcggttaaggcttctagaatggcgactagagcaaagattataaaagggccaggtcatacaggaggagatttggtcttactaagtggtacctggtccgagcctcctgtattgtatatatattacaagtcaacacaagaaaaaaaatatcgaattcgtctccggtatgccgcgaatcggcctgtttatataagagcagagtttccaggtgctccacctatttttcagtttcaagtagagcaaactttttctggtcagaattataacgatttaaaatatggtgattttcaatacgctgatactcctattattataagtgcacctacatatgaaagtgtgcaacaactgcaattatggcaagaaacatcaaactatcttattatcgacaaaatcgaattcattccaattgatacaacttctcaagaatatgaagggaaacatcaactagaaaaagcaaagaaagcggtggaagttttgtttaccaatgatgcaaaaaaggtcctgaaaatagatacaactgattatgatgtggatcaagcggcaaacttgatagaatgtctgtcaaatgaacaatacggacaagaaaaaatgattttattggatgcagtaaaatacgcaaaacaactgagtcaatctcgaaatttgattcaaaatggaaactttgaatctgcggatatcggatggacaacgagtaatactatcacgattcaagcagataatcctattttcaaaggaaagtatctcaatatgccaggtgcaagaaatatagacggcgctatatttccaacctacgcattccaaaaagtagatgagtcaagattaaaaccatatacacgttataaggtgagaggatttgttggcagtagtaaagatgtagaagtggtagttacacggtatggtgaagaagtagatacaataatgaatgtaccaaatgatttaacatatgatgtaggttctgttaaatcttgtggagaatggaatcgatgtgaacaacagccatatcaaaataggaaccaagtgttaaacaattctatgataattgctaatacttctaatgcatcaaactcttgtgaatatgtaccagagaaaaaacgtgtaatgtgcccagaaccacatcaattttctttccatgttgatacaggagaaactaatttgaacgaaaatttagggatttcggtcttatttaaaatttcttcaccagagggttacgcaatattagataatattgaattaatcgaagagggttcactggtaggagaatcgttggcttatgttcaaaatcgagaaaagagatggaaaaataaaatgcaagcagaacgtatggaaacacagcaagcatataatatcgccaaacaagtagtcgatatcttatttactgatcctcaagatacagcattaaggttcgaaacgaataaatccaacattatttcagcagatgagcttgtgcagtccattccttatatatacaatgactggttacgagatgtaccaggtatgaattacaacatgtttacagaattaaaaggccggatcacacaagcatactatttatatgatgatcgaaatgtgcttcaaaatggagactttaataatggactcacatcttggtatgttacaggaaatgcagaagtacagcaaatagatggtacatttgtattagtgcttcaaaattggagtaccactgtttcacaaaatgtttgtttacaacacaatcgtgggtatgttttacgggtaaccgcaagaaaagaaggcatgggaaatgggtacgtgacaatgagtgattgtgcaaatcatatagaaaagattatatttacttcttgtgataataatatagttgttacatcaactgactctgcagaatatgtaacacgaactgtctccttcttcccagatacagaccacgtacgaattgaaattggagaaaccgaaggtacttttaaagtagaaagtgtggaattgatttgtatggaggggaaggaataa

SEQ ID NO: 19 - DNA, 2109 bp, Artificial sequence
  Synthetic polynucleotide or polypeptide
atgaattcatatcaaaagaaaaatgattacgaaatactgaatgcttcaccaagctatttgaatacgttgaatagttatccaagatatccattagcaaatgatccacaagcttctatgcaaactaggaattataaagattggcaaaatgaatgtgaaggaattactccttcaggattcggggcatttagctttataatatctattataatgcaatttcaatcttttctttcagagccttctttgtcaggggcattgggaataggagtggatatagctgacagcttaatagctgatgatgtatcccaattgtcagcgagggaggtaagagatcttattcaaagtgggctaacagacttagctataagtatagcaagtgggagttttaacgacatagtagagaaatatcgggactatctagaggtgtttaaaaggtgggaaatcggaggaaggacggatgaagataccagaaagactatcggacgcctgattatggatgccgaaagggcagcagcagaactgaatcaattttcccacggtgactataagataccattattgcctacctatgcacaagctgcaaatcttcatttaaaaatattaagagatattttgatacatggaaaagatttgcaaataataagcactgctgatcgtcaattctatagggataaactatttaatggtctaaaagattatactaattattgtgtagatcagtataatgcaggtttaaaccagataaaagaggctggtactagtgctgcaaattggctgagatttcacagatttcgcagggaaatgacattgtcggtattagatttaattgcattatttccaacttatgatattgatagctatgatttaccagtaaacgtggaattatctagaataatttatacagatccagtaggttggactgtagaagggatgtcaacgatttacccttggtatagtccttataataggcttgcttttaatcaattagaagcagagacaatacgtggtccgtatctctctacttggttggattatatcgatatatattcatcacaatattcctcattaaaagtgtggtctggcaacgccaatacgatgaagacgattggtggcgtaacgggaagacaagatggatctgcagtaggtactcctcagcggattactgtaggtaatactgatatttttaaagtagaactaactgctggtgttcaccattttttgattgattatactaatcctaatccgcttcgttcgtatggaattattaactctaagttttttatgacaaacggatctactccgacatatacagggtctgttggttcaatgcatactcaaacaggcaaagttgcagctttaccaggggtagaatcagaagtcccaactgcaaatgattatactcataggttatctgatgtaataaatttaacaggaggacttcctcaacatggcagtaacagtgtacgctcctccttagtagcacatggttggacacataaaagtttaacccgtacaaatataattgaagccaatcaaatttcacaaataccggcggtgaaaggatattatttagggttttatggagcagtcaattacccaaatccaaatagagtaataaaatctcctgggcataatggtggggatctgttatatataggttcgactttaaattatgattttaattctaataatagccaactatataaaatcaggattacgacaagccaacaaaatctaggtaaatcctatcgtttgagggttcgatattcaaatagtgctggtaccaataatacattatttatacgaaaaaatgatggggttcaaacagaatatgcctcaattacgactaaatatactgcaaatccttcctatgaactggattttacaagttttacgttaggcgaaagttttagtacgattaaattaaatgcagttacttctactttagaacttgcttttgtggtgaatccatatacatcaccaaatccgggtggaggaatttatatagataagattgaatttatcccagagaatataacaactttagaatatgagggcgaacgaaacctagaaaaaacaaagaacgcggtgaacgatttgtttaccaattaa

SEQ ID NO: 20 - DNA, 2061 bp, Artificial sequence
  Synthetic polynucleotide or polypeptide
atgaatccttatcaaaataaaaatgaatatgaaatattggatgctttaccaaattattcgaacacggtaaatacttattcaaggtatccgttagcaaataattcacaagctcctttacaaaacacaaattataaagattggcttaatatgtgcccaaataataatatattgtgtactcctagagatattgatattaattctgtctctgccactataggggcagtaggttctatattagctcttattcctggtccaggagaagctataggatttgttttaacaactttcacatcactaataccttatctttggccaagcgacacaaagccaatatggggagatttcacaaaacaagggttacaactttttagaccggagctaggcagagatgcaatagaaattataggaaacaacgtacagtcaggatacaattctttaaaaactatgatgcaggactttgatactaggtttaacaattggaaaatctatagaactagagctgatgcaatatatctcatatctgcatttgacaatgttaaagatcaaattatccgacttaaaaatgacttcttaataaatcccgataataaatccgcatttctaaatctctatgcacaaactgccaattttgatttgattttatatcaaagaggggctatatatggagatgattgggtaaaagatataaataatagatccatatctcagttaggatcgcaagaatattatgactctttaaaaactaaaataaaagagtataccaattattgtgcagaaacatatagaagcagtttaaatatactaaaaaataaccccaatatctcatggaatacgtataataaatatcgcagagaggtgactttaggtgcattagatttagttgcattattcccaaattacgatatatgtacttatccaatacaaacaaaaacagaacttactagaaaagtttatatgccatcgttctatttacaagcacttgaacaaaggggaaatctagaatcattggaaaatcaacttacacatcctccatcattatttacttggttaaacgaattagacctttatacaataagtgaaaatttcaatccagctttaagggtatcttcattatcaggtcttcaaactaaatatcgttatacccaaaatccgactatacttcctaatccggctcaaggaatcacgaatggtacaccagtaccaatagggttaaataacttgtttatttataaattatcaatgtcacagtatcatgatccaaatgattgctatccaatagctggaatttccgatatgaccttttataaaagtgactacaaaggtaatgcgtccgcaactcaagcttatcaagcaggtagaaactcaaataatgtcataaatacatttatgaatggcccacaagatgcatcaagctcaaataatatttctattaaacaaaccaaccatatactatctgatattaaaatgaactactctcgaactggcggattttatccaacatatacttttggatattcatttgcttggacacatactagtgtagatcctgataatctaattgttccaaatagaattacacaaattccagctgttaaagctaacaatttgtctttaccagctagagtaattgcagggcctggtcatacaggaggagatttagttgctcttgtaaccagtggtcaaatccaaatccaatgtaaaacaggtagctttactcaaccttccagacgttatggcatacgtgtgcgttatgctgcaaattatagatttgacgtggatatatcatatacatcacagggcaattcatacactaaatattttgttacagaacatacattttcaagacctaataatataataccaacagatttaaaatacgaggagtttaaatatatagatcatgattataataatcaacctattacaatgaatttgcctccaaatacaataacaactatatctattcgacaaagttttttttctacaaattatcaattaattattgacagaatcgaattgtatccattggatcaaggtgtaaaaccttgtacattgaaataa

SEQ ID NO: 21 - DNA, 618 bp, Artificial sequence
  Synthetic polynucleotide or polypeptide
atgaagaaaaaaacaggtactgcactcatactctcgctaggaatcttagcaagttcaggatttattagtaatccgatagctctcgctaaaagtgatacgaatatactacaaattacgaatcaagaaaacgcattagatttcaaaaacaactacaaagacgcaaaattatggggcgaacaaaattatcaaaaatggattacaaatttaacagattccgaaaaaaaggtattaaagtattatactggagaccttaactacgaagagattaatagctacctaagagaaaacaaaggcatccttaaaccgaataatcctaataatgatagaattaatatcatcgatcatgcattagaaaaagcaacaactccagaagatatttatgtatacagaagagtggacgaacttgcttttagtgattatggatttgatgaagaattacttaatatggatggaaatacattaaataaagctgcaataaaagacttacaaaataaaatacttggtaaaacacaagaaatttttgcatatactagtacgtctgctgcaaaagatcgttcacttttggtctcaaataagccaatattattgcatattaaacttcatcaggaatgtgactaa

SEQ ID NO: 22 - DNA, 2004 bp, Artificial sequence
  Synthetic polynucleotide or polypeptide
atgagttcatatcaaaataaaagtgaatatgaaatattggatgcttcaccaaataatacgaatatgctaaacagatatcctttggcaaacgatccagacgttatgaaaaatacaaattataaagattggctaaatgaatgtgaagggattactcctccgggtgtaagagggttatttacaagtataatatctcttataataaaaagtctttcctttattcaagcgccttctttggcagggggattcggaatagggatggaaattgctaatttattgagaaatggtaatgtatctcaactgacagcgacggagataagagatcttattcagagtgggctaacagacttagctataagtatagcaagtgggagttttaacgacatagtagcgaagtatagggactatcttacggcgtttaaagagtgggaagatggaggaagaacaagtgactttgccagaaataatgccgcaagactgattcaggaggctgaaagcgcagcagcagagctggaacaattttcccacggtgactataagataccgttattgcctacctatgcacaaactgcaaatcttcatttgaaaatattaagagatattctgagacatggagcagatttacaaataatagaacctgctactcgtgcttactatagggaccgattatttaatggtttgcaaaattatactaattattgtatagagcagtataatgcaggtttaaaccagataagacaggctggtacaagtgctgcaaattggttgagatttcacagatttcgcagggaaatgacattgtcggtattagatttagttgcattatttccaacttatgatgttgatagatatgatttaccagtaaacgtggaattatctagaataatttatacagatccagtagggtattcaatgggttcccatgatatatcttggtatgcatctgaacaaggtgctaattttaatgatttagaaagagaggtaatacgtagtccatttttcaccacttggttgtggatttactttagtatatatacagatacaatacggtttggaagccaatttgtaggagaagtgtgggctggtaaccatactcggctaactagttatacaaaagcgtatgacctagggagcagagtagaaggacatacatcaggtccttctactactattaatacagaacttgatattttcaaagtaaatgtgactgctgctacagatctgtttttggatgttggttacgttccgcgccgtctatatggaattagtagatctgaattttttactagaaacggatatcaaacatatgcgacaaattccggttcaatggggactcaaaatgtagttgtagcccttccaggagaatcatcagaagtaccaactgtaaataattatagtcataggttatctgatgtaataaatttaacaggaggacttcatcaacacaacctccctagtcgctcctccttagtagcacatggatgggcacataaaagtgtaaagactgtaaataattatacagccaataaaattaatcaaatccccgctgtgaaagtaagacagcttccgagtggtgttaatgtaatttcaggacccggatctactgggggggatttagtaagattactaagtaacggatcagtgaattacagagtttcggctagcgatttagcagcaaatacagtaaattacatagtgcgtttacgttatgcttgtgtgggtcaatctgtattaaatgtactgattagtaatagaagctatccaattacacttgcttctacagcttcatcattaaccaatcttcaatatcagaattttggttatgtatctgttccagctgacattagtttctctccattaggtggtgaaataaatattataaattcaagttcaaattccaacgtattgctagataaaattgaaatggtcccaaatatatcaacatctgtattttcgtcatcagaaaaagcaaaagagtctgttgataatttatttattaataaataa

SEQ ID NO: 23 - DNA, 3288 bp, Artificial sequence
  Synthetic polynucleotide or polypeptide
atgaagcatttatctcaaagtaaccatgtttcagattacacattattaacttaccccgaaaacaatcttcgatttgtatcagatttagatccgataacatatttattggctaggctgaaaaaaggattaactaacggtcagtatttagatgtcatcaccgaaatatgggaatatattgcgttagataagatagactatttatcatttgtaaatttaagtttacctttaataaccatatcagttcctaaggtaggagctacagttccgtttcttagtctattcttttctaaaatggctagaattccttcgacattgccaatatcagatatttttatagcactgaaactagagttagaaaaggtctttagtccaaatttaacaccccaaaaaataaagaataccaataatcagatagaagaattagaagcaattatggaaaattataaaactgcattagttaaacatgaagtgaattccagtgattttctcgtcactttcaataatacagatagagcaattacagatttcataaatcaaatcttagaatcaaaccccttcgaatgttatactccttacttttctattttttccaccatacatctcatgacacatagggatgttattacacatggagaaatatggggatttccgttagcttttacaaatcaaaaaaaagataatataaaaagattacttcaaaaatatattttaattggagacagattctttaaaaaggatttagacactctttttactaatagaaatggattagaaaaagatgttttaaattcatatattaaaaaaatgatatcatatggtcctaatatatatagtttatggcctactctagatcctgatatgtatccatcgtatacccaactaaaaaaaactgagttatctactcctattattatagaatcgaaagtaaatcaaactaacagtgataataccagcaatgtgtgtacgaatagggatgttattaattcgccacctcatcatacactatataattcaaaacctattttgtcagaactcactaagcatcaactacatgtttatgcaagcccaaaaatttcatctgaaaatgtaattggagatattgatttagagcagaacatatatgtatcaacaattgtaggtctgccaatgaccacctatagtaataaccaaggcgatattgtaatggaatggataaatggaggatttacagtaaaactaaaacctaaacaagttgttactgtaccttttataaatttatctactgacacttatcaaatccgtttacgttatgcaacagcgaatcatgaagaagctaagatagggattttcatacgagaaaatcagactggccgaaccctcttaaatagaaaagtagcattttcagctccaactgatttgaattctatacaaggcaagtatggaaaatatgctataaatgtaatagtgaatgatgaaaacgattctgaaaaattaatcttacttgcaggttcttatacgattgttatacaaaatctcatggaaaaagatctttttttagatagaatggaattttacaagaaaaatatacaaaacaatatgttgataacccttcgggcaagagaattaacatctcctcctgatggtgggtctggatgggctaatctatggatagctgaacataatcagatagggacagcctttgaagcaataaatgcagttaatcaaggcgagtacaggttttatcacaatggtgctttaattggagcaattcaaggaactacgttttatgaatccttcgataccgttcaaatttatttttataattgtgtagtgaatgctctcaatccttttgctggtgcaaacatttggatggaaaatgttcctcaagaatgtcttgaaaatgaaaaggacttagaaagtgtaaaagaacaagtgaattccctatttatggagagctcacatgataagttgaatccaaatagtacagattatttgattgatcgattggcattaaaaattaatactttatctaatgaattttttggaaaagagagaaaagaactacgcatgctagttaattacgccaagcatctaagtaaaaaacgaaacttaattagtggcgggaactttgaaaatcttgataattggtatttgggaagaactgttatacgaatggatggagataaatcatctaaaggctatcatatagtaatgccaccacctattgagcatccaacttacgtatatcaaaaaattgatgaagataaattaaaggaaaatactagatataacatttctggttttatcacacaagcaagtgatttgaacattatagtatctcgttatgaaaatgaaattaataatattcttaatatagtaagccaggaagcattaccaacttcacctgaaactataataaatagttatacttctaatattccgtttacatttgaaaagaaagataatgtagactctaatgtttttacttatagtattgatgttggttctttacaaaaagaatccaatatagggatagaatttggactgcgtattacgaaacctacaggttttgctaaagtaaataatattgaaatatatgaagatcgttctttaacagaagaagaaatacgcaaaataaaatataaagaaaaaaaatggaaaagctcatttgtccaatcgcaatcaaaggttaatatacagatgcagcctataattgatcaaattaataatttatatcaaaattcagattggaataattcaattcgaccaactgttatgttccaaaatgtgcaggccattaaattaccaaatttaccaaaacaaaagcattggtttatggaggatcgtaccgatgtacatcataccattatacagcatatgcagaaagcgatataccgcgctttctctcaattagaagagcaaaatatccttcgaaatgggaatttcacaaaaggattaacaggatggatatctgatggaaaggctcaaattatttcgttagaagaaaacaataaagctatacttttgtcgcattgggatgcaagtattaagcaattactcaagattacagattttaattcagatcaagaatatcaaatgcgtatatacggaaaaggcaaaggaactattatgatacaacatggcaataaacttgaatctgtaaacttttctagtaaatcatttatattaaagccaagtcaatatataaatttcgagacagatattgttgaaatttatattgtatctgaaggaggagaatttatcattgataatattcaattaattaaagtacctatagaaatattctaa

SEQ ID NO: 24 - DNA, 1575 bp, Artificial sequence
  Synthetic polynucleotide or polypeptide
atgaatataaatcacggtgtttcttgtggttgtggttgtcaaaaagggaaggaagaatatgaaaatcactatatgccaaatgaatatactgatgtaacttataataatacttgtgaatcacaacaagataattatgaacataaacaagataaagaaaaatacaacagttgtatgtcaagtgaatataaccaacaagataattattcctgtggaacagatcaagcgatgacgtaccctatggtagaggaattaatggcacagcaacataataatttagaaaatacaaattatagagaatatgatgattgtaatccaattccgtttaatgcacctaatttaccagtggaaagtactcgctggcaaaatattggtagaaaaggtattactccgggagatcctgtggataatcgtgcctggacttctgctatgacacgacaaggtgatacattaaatggctggccttttccgggagaatgtcgaacggcacgtttagatgggcaagttatcttttcgacaataaatactaattctgatgatcaattttatattttttatcaaatagatcttcctaatacttttgttatagcgaatttagcccgtggtcaagtgatggagtttagagaaaatccaaatgcactgatatcagtaaataattttacaggtagacctaatcaacttttcaagaaatcaaatgtaaattcagatagatttcttttaattcctataacgaattcaaatcgagagctggatgtatgtgctggaagaacagatcaaactaatcttatatcgtctcattatgcaaatagagggatgacatgggggcattttaatacgagatcgataacaatgccaaatttaccatctccaagaagattagatcccccaagggatttaacatcatcggacgatacgggcgttgcccctgcacaggcgccacgaggagttcaaggtgctgcgcttataccagcaatagcgttaaatgacttgattccagtggctaacagaatgagacaaagtccatattatatgttaacatataatacctattggcatagagttatttcagccataattccaggtggacagaatcctttaagtttttctgtctctttcccagcaccaaatcaacgttcaatgcaagacactttgggtataagtattggagcagactttacattacaatttcagcgaactgatataacatatttgtttcagcaaggaattacacgtggattaaatatcctaaattctacaacggattctcttttaggagatagccaacgcacttattattttaataatgtaggtagacttggtagacttgttcagtatgtaaaagcacatgagtttgttttaacacgtgcggacggaacaagagtgaattcatgggtagcattggacccaaacgttataactgttcgtacagataataatgttatacttacattagaacaggaaaaaatagtatgtgcaagcaatagttatgatttatcagtatggaaaacaccaatggaaataaaaaatggggaaatctatataaagaatgaatgtaattcaaaaccatattaccaataa

SEQ ID NO: 25 - DNA, 2253 bp, Artificial sequence
  Synthetic polynucleotide or polypeptide
atgaatctatatcagaataaaaatgattatgaaatagtagatgttccgcaaaattatgatactgtttgcaagagatacccttacgcgaatgatccaaacatagcaatatcagagggcgtttcgccttctagcataggacttggaactttattaagtcttttttttgattacaaatctttacttggaagtccttctatatcagggggaatagggttcctacaaactattgtaggtctaataactggttctcgcgtagcagctgttacgatagctgatgtacaacgacttattaatcaatccttagatcaatatacgatagaccaggcagtgactagaatggactccataatgaataattataatcaatatcttctaaatttacgagattatataaatgaaagagcgagtcgacatgattttgtacaaagtcttcgaaagaatgaagagagcataagatatgaattagattctttttttagttttcatggtcgacaagttttgttattaccgaattttgtgcaaattgcattattacatttagcaatattaagagatgctgtggcatatagcggacctgatttagaaagaccgtttattagtgaaacagctcaaacaccttttttaagtcgacctcctagtcatacttatcatgaagcacttttaactagtctccgtatatattctaattattgtacgcaacattataatagtggtttaactctaatgagaaacagaggtaattcaggtagagattggctaaactttcatgcatataggagagaaatgacattatcagtgttagatttcgtggcaatttttccactttttgatccatttcaatatattacaataaaaaatatttcgataccagtaacttctcaattaagtaggattatatatacagacccagctggtgttatatccactaacggacaaaccggctggtttaatcctggtgctgttcaaaatgttgtgaggcccacttttacatcaatagaaaatgacataccttttcctactacttctcgatttttagagaatatagaaatcttttcaggtccccttggtgtaggtgtaaatccaagtagaacacatgcatggcaggggaatgaaaatcgaaatgtaaataatatagtagatctctttggaatgagaacgaatcaagggacacatctttctgttcaaaacatttttagagtgaattcaaatgttcatactctggattctcggttgtttggagtttatggagctgattttcttcatatcaatggtcaaacttctcgatatcaagcaccacaaagtcctccatcagctatcggtgttgcacgacaaattcattcacattttttaccaggaacaacctcaaatataccaaatgcaaataattatactcatctattaagcagggtagcaaatatgaccggaggacttcagccaacaatatcgggacaacgtaattcagtggtaatacatggttggacacatagaagtttaactcgtgaaaatatatataattttaatgagattttgcaaattcctgcggtaaaaacaacaacacatacagcaggcattcaggtaaatgcaggtcctggatttactggtggggatttattaagattaaattctaataacacagtaagttacacttttagacctgctaattcatcaataaggtttacaggattatttgtgagaattaaatatgttagtgcacaaaattcatcaataatattgcggtatactgattcatcaggcacaactagagagcatctaataactttattcagtagtacttcatcattaaataatcttatatatgaaaatattttctttacaaatttctccttaacaaatcttcctaatattatgttgaatagtgcaactataagtattaccaatataagtggaaattctaatgtattattagataaaattgaattttgtccaacaaatgcacttggtacaagaggttctgatatgttatcagaagccgtaacagcatgttttaataaagtgtgtaatcaagaatatgatgcttacaatcaaaatgctaatgttacgtatgattcaggatataataacagcccaaacgctgactataattatgatcaaaaatataatatttataattcagacaacaactattacgcccaacatgctaatgacatgtacaatcaagaatatactaataactataatcaaaactctggttgcacgtgtagtcaaaattataacaataattatccgaaataa

SEQ ID NO: 26 - DNA, 2568 bp, Artificial sequence
  Synthetic polynucleotide or polypeptide
atgaatcaaaattataataacactgaatatgaaatcatggataatggtgccagagaataccaaccaaggtatcccctggcgcaggcaccaggttccgaattgcaaaatatgaataatcaagatgtgatgaacacgtgtatcgaaagaacctatgatatagcgcaacagcaaaatacccagcaagctgtccttgtagctacaggtattacgttcaagattctcggtttagcttcaccagcactatctgcggctggaggagtcatccaatcgataattaaattactttggccaaaaccaaacaaccaagaggtctgggattcatttatgaacgcggtagaagcgctcattgatcaaaaaattgaacaatatgctcgaaataaagcaattgcggaattagaaggcttagaaaatatcttggaagaatatgaagatgtgcttaagatttataacgcagaaccaactgtagctcacagagaaagattgagaaatctagttatttctatagatcttttctttgagaacagcatgccttcatttagggtagcaggtcaggaagtaccattattaaccgtgtttgcaaatgcggccaatctccatttagcctttctacgagacattgtccagtttggatctgaatggggtttttcacagcttgaaatagacgacttttataagaacggtctagaagagcttacacaaaaatatacagatcattgtgtaaatacgtacaacaaaggtttagagcagagtaaaaccttaacagccgatctctgtaattttaatcaatatccatggactcgttataatcaagggtttagagaagaagaaaaaccaaattgtagtagtcaacaaataagtcagaggtttgatgaacaagtaaatccatctatggcgtctgtccgttggtcacaaacggagtataggggattagagaactggaacttatataatgcctttagaagagacatgacaattatggtattagatatagtttcgttatggccaacatataatccacggctgtacaataatttgaatggcgtacgatcagagcttacgcgagaattgtatacagatatacgtggaacaacatatcgaagtgatgcatctcaaaatagtctatctgcgattgaggaacgtatgattccaaagcctagcttatttaaatggttaacgcagttgcatttttattggagacagcttgggaatgctgacaattggacagctggccaaattgtcacgggtctgcaaacaatgatacgaaaaactttaggtaatgaggaagtcttacctaaagttggtaccacagggacggctgttaaatctttgtatccctttgataatggacatattacatggatagacacactgcagtggtttgagccaagatggctcaagttctggagtgatggttataacaacggatggacatatcagggagaattaggaacaatagtggaaaaaaatcctttttgggctgcaggtccccttactcgcatctattatccatcagagagagccaattacattcctgatcatcgattatcctgggtcacgtatgaaccaataagatcaaattcaccttatggttggacggaatatgcacaattaggcgctcttgcattagggtggacacatgaaagcgtagatccaaacaatactatagtaagcgataaaatcactacaattccggcggtgaaggcttacgatattggagctagcggcccaggccaagttatcaaaggacctggtagtactgggggcgacttagtatctttgtcttataatacaagcatgaaagtgcgtttaaccccttcaacggtagggcgtaatcaatcctaccgtgttcgaatccggtatgctagtacgggaaatacacaaatgtatgtagagaaatggagcagatactttaacccttacggtcaaacatacaatgttactccgacatattctagtggcgcattaacatatggaacatttaaatattttgataccttcaacatatatacgggagaaccggattttgaaattattatccaaaataagagtaatacaacgttaatcatcgacaaaatcgaattcattccagtaaatccgatactagaaccaccagcccctggtcctggtcctggtcctgggacctatataataactactgctttagataatggttgggatctaattgttaaatcgaatgatcccaattataatgtagcattatggacttataatccaaatatcactgacactagtgcgcaatataggtttgaatatgattcaagtaaaaacgcttatcaaatgtatagcgtggcatattctcagtactctgtagtattaactttggatattaaatcaaataatgtacatggtgcaaggaatacccagcagctagcgcagtattggatgattgcagatgcaggaaatggatatgtttatttaattaataaggcagatccgagaaaagtattagctgtagctaattcaagtgttggttataatgtgaatattataggatcggattatactggcggtactaatcaaaaattcaaactaattaagttaagttaa

SEQ ID NO: 27 - DNA, 2169 bp, Artificial sequence
  Synthetic polynucleotide or polypeptide
atgcctttagattattcgaaaattttaaagaaagtgttacttacgactactgtaactaccttaagtgttggggtagttacaggctgctcactgttttcttctgaaaagaagagcactaaaacagcatcagtatctaaaaagaaaaaggatagtgaaaaagaaaagaaaaaagatgagaaaaaagaagaaagtaagaatgaaccgactgaaaatctaaatactaatgattttgatgaaatcattgataatgcaaaacgtagctctgaccaaaatttagccggtatcattgaaaataacaaagccaaaaagaaatttgatgacttaacagattcaattgcaactgcagctataaactcagatcgaaacttagcgtcagttattgacggtgataaatcaaataatcgtttttcagatttaaatacttcaatagcatcagcaacaaacaatccttctgtctcggataataaggatagtaagaactttgtatttggtggcgatctaaatattaatgatggtgtagctattgcagataactcaatacctccaattaataatgataaaaagccacctacttctggtaacactagtagcgaggaagtgaaaccgccaacaggtggtgaaggtaataatggaggcggtacaaaaccaccaacaggcggagatggtaatgatggtggaggcggtacaaaaccaccaacaggtggagatggtaacgatggtggaggcggtacaaaaccaccaacaggcggagatggtaacgatggtgggggcggtacaaaaccaccaacaggcggagatggtaacgatggtgggggcggtacaaaaccaccaacgggcggagatggtaacgatggtggtacaacaaaaccagaaaaggatacagtggcaccagtaattacagcgaaacaaggtgtaactgtttatgtaggagatagtctaaatgcgggagatttagtagaagtaaaagataataaagatgcaaacccagtagtaacagtgggagcgtacgatacaagtaaagcaggggaaattcaagtaacagtaacggcaacagatgcatcaggaaatagctcaagtacaacagtaaccgtcagcgtagtagaaaaagaagaagagaaagatacagaagcaccagtaataacagcgaaacaaggtgtaaccgtacatgtaggagatagcttaaatgcaggagatttagtagaagtaaaagataataaagatgcaaacccagtagtaacagtgggagcgtacgatacaagtaaagcaggggaaattcaagtaacagtaacggcaacagatgcatcaggaaatagctcaagtacaacagtaaccgtcagcgtagtagaaaaagaggaagaaaaggatacagaagcaccagtaattacagcgaaacaaggtgtaactgtacatgtaggagatagcttaaatgcaggagatttagtagaagtaaaagataataaagatccaaacccagtaataacagtgggagcgtacgatacaagtaagataggggaaattcaagtaacagtaacggcaacagatgcatcaggaaatagctcaagtacaacagtaaccgttaaagtagtagaaaaagaagaggaaaaagatacagaagcaccagtaattacagcgaagcaaggtgtgacagtacatgtaggggatagtctaaatgtaggagatttagtagaagtaaaagataatatagacccaaatccagtagtaacagtgggagcatatgatacaagtaagccaggtacaatatcagttcaagtaacggcagctgataatgcgggtaacagctcaactgcaacggtaacagtaaaagtagtagaaaaggaagaagagaaggatacagaagcaccagtaataacagcgaaacaaggtgtaaccgtacatgtgggagataaattaagtccaggaagtttagtgaatgtaaaagataataaagattcaaatccattagtaacagtaggagcatatgatacaagtaagccaggcgcaatatcagttcaagtaacggcaaccgataaggcaggaaacagctcaactgcaacagtaaatgtggtagttcttgagaaagaaaagccagagcaaaaaacagctgaaacaacatttaaagaacaaggtaatggattacttgcagcaaattctaatgatgtagctaaatag

SEQ ID NO: 28 - DNA, 1611 bp, Artificial sequence
  Synthetic polynucleotide or polypeptide
atgaaccaatatcagaataaaaaagaatacggaacattagggtatttgaataattataaggatattccaaacagatacccttttgcgaatgatccaaacccacaattacaaaatacgaattataaagattggttagatatgtgtaatccagagtataggtattctaatcctgaggcttataagagtgcaaaggcttcaataggttttggaatcggcttattttctactattttaggtatatttggtgggcctatttcagctacaatcggaacaattataggagttataacagcggtattagaatttatacctaaagataaagataacggcggatttatggaaatttggggtgttttaattgatcatgttaaagaactaattaatgatgcaattgctgctgaggcattaaatcgtgcaaaagctatactagatggtctttatactgtgatgagcgagtacaatagtaagttaactgcatgggaagatagtaatcaaactagagatttaaatagtgatatgataactgtatttatgactaccaatacacaatttttaaaagagatatcagccttaaaacaagtagggcatcaggtaagttttttacctttgtttacagttgctgcaaatttacatttattattgttaagagatgtcagtatttatggagcaaaatgggatatgagtcctgaatttattgaagattattatagtggggatcaagggcaattaaataaaacaaaagaatatactaattatgctgtaaagacgtataatgacggtttagaggccgcgaaaaagataccaaattcagataaattagactgggatcgttataatcaatatcgtagagacatgacgcttaccgtattagatatcgttgctgtatttccgacatatgataatcgtatatataataaatcgacaaaaatagaattatcacgagaagtatatacagatatgattagttatatttcgaatccgtttattacgaatccagtagaaggacaaaggtttgttggatatactgtagatcaatttaactcaattgaaaatgcattaactcgaaaaccacatttatttacttggttaagtaaagttacaggttatttttatcaacaatatgcccaagataggcttatgaccgctactcaaaatcaatattattatactaacaacagcatttatcctattactggtccaatacacggggtgcgttattcagatgacacgaatgctagtgttactctaacaaattatcaagatatctattccactttttcatctattcttccactagagactagtaatcatgtaagtgagcttgaactaggaacaaatcgttattttggtgtacgaagtaatacttattctattacagatagacgtacagctaataaaacgcaaaaaatacttggcgaagaaattttaagaggaagggctacaggcccgtcatcaataagatctgaaattccttataaagaagaaataccgccaactgctgaagagtacagtcatagactatcttatattagtgcctatgggttctggtgcaaaaacataaaaaacttgaaaataatttttctaacttggccatactggtactacgactaa

SEQ ID NO: 29 - DNA, 2520 bp, Artificial sequence
  Synthetic polynucleotide or polypeptide
atgttagcatcctttctagtcctcctgtttcgcgtggtaacgaaaacagtaagggatttattaagagctgacaagcctttttttatgcactgtatctatgtacaaaatcgtcgctcgactctgtacttttattttgcactaaacacagccctccttgcaagtattggaattgtgagtcgtctcatagcgcccatagctccagcatttggactcgcaggtggacttattggcatcatccttccgttactctggcctgtagatacacaggctgtatgggatgcatttatgaaagcagtcgaaaagctaattgatcaaaagattgaagaatttgcacgagcacaagccgtcgcaaggttagaagggataatgaatgcactcaaactttatcaggacgcgctgagcaatttggaaaagaatccgaataatgctgctctgcgagaacaagttcgagaacaatttatagctacgaatacgtacatcgtcggatcgatgcctctgttccgtgtcagaggatatgaagtacccatgttaacgatgtttacagaagctgctaatctccaccttcttctcctacgcgatgcggtaaagtttggagcaagctgggatatggatgtaagtaccgtagaagtatatcaaaagtatctggaaacagagacggtaaactatacagattattgtgtaggtacgtacaatgtaggtttggagaaagctaaaacattagccgccaatctctgtgatttcaatacctatccatggactcgttataaccagggatggcgagaagaagaaaaaccgaattgtagcttacaacaaataaatagatgtgagctacaattgaatgaacaaatggatgtatatggagctgcttttcgttcttcgcctggcgaatacgagaaattagagaagtggaacttatataatgcctttagacgagacatgactattatggtattagatcttgtgtctctctggccaacatataatccaacactgtatacgcttcctgttaaggcggagttgacgcgagaaatatataccgatatacgcggaaccacataccgaagtgatgagtctcaaaatacactacctgtcatagaaggacgtatgattccaccacctcgcttatttcaacagctacgtagctttacttttcatttgcagaatgttcatagtgattggactgcaggccaaattgcgactggtttgcaacaaacggttcaaacaacattaggaagccctgaagctttgcaactaaagggcacgactggaacgcagactacaaccttaaatcccttggagtatgctgaaggaattactcatataaatacgcagcagtggtttgagccaagatggttcgagttttatagtggtggttataatacagagttgatatttcggaataaattcggaacgatagaggaaaaaagtcctttttgggctgcgggaccgctagattatatttataggccaggaggaagaacgaatcagattccagatcaccgattatcatggattacgtatgagcctgtaagatcaaatgcaccttttgtttatccacaatatcaacagttaggcgctcttgccctaggatggacacatcagagtgtagattcagaaaatgggatagtctcagataaaatcactcaaattccggcagtaaagggggaacggctagagggaggcgctacagttctaaaaggacctggaattacaggaggagatttaatacatttacctgcgtcccaaggaaaaattaaaattaacctaagaagcaaagcaccccaacgaagatttagtgtgcgtattcgatatgctgctactgctgcgggtcgattacaattcggtagaattgccgatgatggagctattcattcgacaagtatagagtacgttactaccggtgcgggtgcaaatgcaagttctttaacttataatcagtttcaatatctgtatattgatccaacagaatcctataacatttatcatggcatagtacttattaacgaaatgggtggaccaatctacatcgacaaaatcgaatttattccgtcacaaacagtagaaccaccaatccaaccgctaccaataccaaacggtatctatcaaatcgttacggctttaaataatagtagtgttgtagaaccatggataggaaatgtatatcccataaataaccacattcaactagggacaaatattaacgctgatttgcaaaaatggaagttcgtatatgatgtaagtaaaaaggcttatcaaattaaagttatagtagatgaggattatgtattgactagaattggatctgaacatgtgacttttagaaagaacctttatacttacagccaatattggagaattcgtgatgcattaaatggagatttttatattcaggatgtagatctcacccaagcattagacgtactcggttttattccttcagatggaacacgcgttcaaatatgggattttaacggcggtacaaatcaaaaattccaactgcggaatgtagaagttgagtaa

SEQ ID NO: 30 - DNA, 1239 bp, Artificial sequence
  Synthetic polynucleotide or polypeptide
atgacattgatggtattagattatgttgcattatttccaacctatgatccagcgacctatccattaccaacaaacgtggaattgtctagggtaatttatacaaatccagtaggtacctcgggcaccgagtttaatacttggtatcttacttacagatatcgtgctaatttcaaggacttagaaagagaggcaaggcgtactccttctctcaccacttggttgaataggattcagatattttcaggtaccatattacccataaatgccaacccaataggagtgtggtatggtaatattaatgattacacatacacacatggtggattcatgtctagaagcgatggaaggacacaaggtactcctatgattattaatacgtctaataatgatattttcaggctaaatttgcgtgctgcttctgcttcaggacggcttggtgacaatgagagtacttttggaattagtcagtctcaatttattaatgtaaacggagaaaacttaacatatagatcaagtcagccttatccgtctgcccaaataactgtaacttttccgggaagatacgtacaagaaggcaatgcaaatgattatagccataggttagctgatgtaataaatttgacgggaggacttcgtcaaacaaacagaggatattcttccttattagcacatggatggacacatacaagcttaaatcgtcaaaataggattgaactaaataggattacgcaaataccggcagtaaaagcttttgatatatcagatacaggaccgggtcgagtcatagctggtcctggttctacgggaggagatttagtactgctacctaatcatgcacgtttgaaaatacgtttaactcctgcatccacgggtcaaatttaccgtgttagagttcgctatgcaagtacatcaactggtagagttcaagcacaaagatggtcgccgagttctgttgtatctagtgatttcacttataattctacgggttcattgaatacatttggatatgtggaaaccttatctaatacatttaaccaaccaggtgttgaaataattatacaaaacctctcttctacagactttgttgttgacaaagtcgaatttatcccagttggaaccttggcaagtcaatcattagaagaaacacaaggttgtaacaacaactataatcagcgctctgatactctgtataatcaaggatacgatacttatgatccaaatagggaaaatacgtattaa

SEQ ID NO: 31 - DNA, 1341 bp, Artificial sequence
  Synthetic polynucleotide or polypeptide
atggaagaatatacgaaaatatacactaattattgtacagaaacatataaagtaggcttaaatacacttaaaaacgaaaagggtatgacatggaatatctacaatgcctatcgtagggaaatgactctcactgtattagatcccgttgcactttttcaaaaatatattcttatccttcaacataaaatggatatgcattttgaacttacaagagaaatttataccgatgcaataaaccttgaaggagcactaatacataaagaacttgatacgttagaaaatttgcttacacgtaaaccatctttatttacctggttacacagaatggatttttggacaacagtaaaaacaggaggggttttgagtaattttttgtcaggtattcaaaatttttatagattaacgaactctaatactagcatagcaagttctatttatggtaatacaaatggtaaaaaagaagaacctataactttattagctggatattttatttataaactttcaatagctcattattggagcgtcatattaaggacgcctgtaattggcatcaaaagtattgatttttttgtaactcgttctaactcaaatacaccattacgttataattcagggggagcattcgattttacaacgacaattttacaatttgaaagttgtaacaaaattactcatccaacatgtactccagttgctccaactcctgaaatttacagtcatattttatcatataataaactgtataatactgaacaaggaatttctcaagctgcaacatatgcatttggttggactcataatagtgtagactttactaatacagtcaaatcaaaagaaattacacaaattccttctgtaaaggcttcttacattagtactgagtcacaagttatacaaggtcctgggcatacaggaggagatttaattaaactcgggactcgaatggaacttaacgttgtatttgaaaggccattggcaaataattatcgtatacgtattcgttatgcttctaaaggtataaattcattaaggatagatgggttttggttatctaccaagacagttaatacagaagcaacatttacagatcttaatcttactaatttaaaatacgaaaatttcaaatatattgatattaatcctacaatatataaagataatatattagcggagccaattaataaactttatttagaaaatctaacatcaactcctggcaatgtactcattattgacaaaattgaattcattccaattactcaagcggtattagattatacagagaaacaaaacttagaaaaattacaaaaagaattgaataatctatttattgattaa

SEQ ID NO: 32 - DNA, 3579 bp, Artificial sequence
  Synthetic polynucleotide or polypeptide
atgcattcatatgaaaagaaaaatgaatatgaaatattggatgcttcaccaaacaactctaatatggctaatcgttatccaaggtacccactagcaaatgattcacaaatacttatgcaaaaaacgaattataaagattgggtcaatatatgtcaaaaaactcaaaagtatgatgtagattctgaaggatttgccagtactgagattatcgcaggagttagtgcaggtcttaatataactggtacacttttaactggttttagagtgacagcaccatatggaattgcattaatagtttgggggagtctacttccatttgtgtttcctgaagatagtccccaaataacttggagagatttgttaacaattggaacaagaccatataatcgacctattgatgaaacacttttcggacatttaagaggtcacttattgactcttaaagaaccgtctaaaaaattccaatctgattttgatgcatggcttaaaaatcgcaattcacgacctcacgccaatgctgtattaagccaatttaatattttatataatttatatggtcaaaaagaacttttcagaggagtacaagcacttcctttatttgtacaaatagttactttagagttaactttattacaacatggtgctaaatattatgatgaatggagtagagttgcaaatgcaacttcgataaatgaaattgattcatttgaacgttgctataattcatcagaatgctataaacaaatactaaaagagaatatacaagaatatattaattattgtactcgaacatataatgatggattatccatgattaaaaattcttctagtgtaacatggaatatatataatacttatattactgaaatgactttaactgtattagatattattgcggttttccctaattatgatccggatatctatcaaataccagttcaaagcgaaattacaagagagatttataccagtactttaactcttaatagagattattcacttgataaattagaaagtgattttacaaaaagaaaatcactttatttatttacttatctaaaatctctacatttatatcacactatacaagaagaagcattaaggccgagtcatttagctggtgtgtcaaataatacagcaccagtaaatgggatggagttagtttatgggatgtataaacccagtgatataacttcaaatgacattaagctttataataatcaacctttagaattcataaaaagtaatcttccaactaagttagaagttatatcagcacctcaagacattgatatacatcaaatgatattcattaaagtaaatggtgaatcagtaataagccgttttacaaaccaaatgccaggaactataagaaatataatttttaatttaccggaacaaaaagatccatttggaaaatctgtaccttcccatgtattatcttatgtgaaaataagcccacaagaatattctggtttgattttagagggtcatggagtacaagcgagctttggctggtcacgtgctgatattgatttaaacaatacaattagaaaagataaaatcacacaaattccagcagttaaggctagtaacattagttctgacacacaagttatacaagggcctgggcatacaggagggaatttaattaaacttggtaatcgactggaactctcagttacatttgaaaaacgattggcacgtaattaccgtatacgtattcgttatgcctccaaaggtgtaaattcattttcaatagatggatattggttagcatttaaacaggtttcaacaacagcaacattcaccgatcctgaccttactaatttgaagtatgaaaactttaaatacatcgaaatggatactaaattatatacaggtaatataggagaggtaggctttaatccactttatttagaaaaccggacatcaagtcctgatagtatacttataattgacaaaatcgaattcattccattaactcaaactgtcttagataatatcgaaaaacaaaatctagaagaagcccaaaaatcggtgaataatttgtttactactgatacaaaaaacgtattaaaaacagaagcggcagattatgaaatcaatcaggccgcaaatatagtggaatgtgtatccgaagaagtatatccaaaagaaaaaatgatactactagatgaagtgaagtatgcgaaacaaagtagtcaatctcgtaatctacttcaaaatggagagtttgaatcgagtacacttggctggacttcaagtaataatattacgatacggcaagataatcctatctttaaaggacattatctccatatgtctggtgcaagagatattgatggtacggtattcccaacctatatctaccaaaagattgatgaatcgaaactaaaaccttatacacgttaccaagtaaggggatttgtggggagtagtaaagatctagaactggttgtttcacgttatggaggagaaatcgatgcgagcatgaatgtgccagatgatttatattccctctcgcctatccctaattgttgcgagacgtcctttgcctctgctataaatcagggagattacacgaatacttctaatccatgtccatatgatcgaaagaaaaaacacgtagtgtgtcatgattctcactcatttaattttcatattgatttagggacaatagatacaaatgacaatactggtatttgggtcctgttcaaaatctcttcatcagatggatacgctacattagggaatctagaggtcattgaagaaggaccactaacaggcgaagcattggcccatgtgaaacaaaaggaaaagaaatggaatcaaaacatggaaaaaaagcgaatggaatcacaacaagcctatgattcagcaaaacaggcagtagatgcattatttacaagtgcacaagaattacaatatcatattactttagatcatattaagaacgtccatcagttggtacagtcgattccatatgtacaccatacttggttatcggatgttccaggtatgaactatgatttatatcaagggttaaacgcacgtatcatgcaggcgtacaatttatataatgcacgaaatgtcataacaaatggtgagtttacacaaggattacagggatggcacgcaacaggaaatgcagcagcacaacaaatggatggatattctgtattagttctatcaaattggagtgccggggtatctcaaaatctgcatgcccaagattattatggatatgtactgcgtgtgattgctaaaaaagaaggtcctggaaaagggtatgtaacgataatagattgtaatggaaagcaggaaacacttacgttcacttcttgtgaagaaggatataagacaaaaacagtagaggtcttcccagaaagtaatcatatacgaattgaggttggagaaactgaaggtacgttttatatacaaagcgttgagttgctttgtatgaaaggatataataaaaactataaccaaaattctagtagtatgtataatcaaaatggtaccaataattatgaacagcactctggctgcacgtgtagtcaaagatataataattaa

SEQ ID NO: 33 - DNA, 1059 bp, Artificial sequence
  Synthetic polynucleotide or polypeptide
atgtgggatctagtatttcctagtagtggtatatctttaatgcaagaagttttaagatctacagaagcattcttaaatcaaaaacttagtcaagaaaatactaatcgtataaattcagaattgcaaggtcttcaagctagtataaaagaatttaatgaacaagtagatgattttttgaattctcattcgtctattacgccatttgaagtaatagattctgttaatgcaatgcaattagtattggtaaatagaattccacagtttcaattaaaggaatctgaaattttattactagctgaatttgcacaaggagctactttacatctgacctttataagagatgtaattcttaatgccaaagaatgggaaatccctttagtgactgtacaaagatatcaaggattgttaaaaaaatatactggagagcactctaattattgtatgaatacctatcaaaatcatttccagggaataaataccgatatacagaatctattagaatttagaactttcatggttttaaatgtacttgaatatgtatcatcatggtcaatgtttaagtatcagagtataattataacctctagtgctaacttgtatgctgctggtaaacctaaatcgggaattgtacaaaatttcactgctaaagactggtcgtttttaaactcactttttcaagttaattccaattatatattatctgggtttagaggatattgttttagtggcttgaccgctactaacacttacagtgaatggttattaaattttgtaggggattatatcggaggaattggtcatccttcaataaatgatttcaattttcattgtagcttaaacaatctagtagtagagagccctatgttaagagttcgattaaatcaagtgtttataaggaacactgtaagacatttgagcattattcaggagcctttaagaaggaaattggaatgcattgtggagctttcccaccttgagatacagaagttaactattttcctgaatattacatttgtaatatttctggaattacgcgtgtatttaagggtgaagatttaa

SEQ ID NO: 34 - DNA, 1359 bp, Artificial sequence
  Synthetic polynucleotide or polypeptide
atgaagcgaacaagtatgtacaaagtattggccacgacggctatcttaggacaaacgttggtaggacctgtattatcccacgcggatacagagccaaccaatgttggagcacatcaccaacaacaaaacacatatgataaaaagctaaaaaactttgcatttaccaattttgcggaagagggagaaaaagattttaaggataagccaaaagaagcaaaagactggataaaagaaaaggtaaaggaacaaggaaagaaaatgtcttcctcagatacaaaagctttacaagaccttgtgaaaaaagataacaaagaaataactgaatatctaattaaaaataaaggggggttagtagataaaaatcccctaaattcaaaaattgaaaagttagatactatcttcgaagagaaagcgaccaacatagatacttcaatgaaagtatatatgaaactttctgacatgaaaatagaggatttaatgcaaagagaggatgtagcaaaagtaaaaggtaccattttaccaaggtatggttatacgattacatcccctacaaatgtgacaggagcaatagtagagctcaccgtaccgaaaggaagtcgcgttgtgtatggaaaaacaaatgattctggggaattaatgattgaacgaggcacaggtttcttagtaacagatgtaaaagaagttactgataaaggggtagtgcgtaccaaaatggaagcaaaacttctatcaaataaagaaatgaaagagcgggaatctaaactaaatgaagtgagtaaatcattaagtgatacaatgaagatgccggtatcactggaattctcaaatgcagaaacgacagcttctatagagaaagccagaaagggcattgctgagacaaatacagctcttgagagtatcagtaagattattccaacatttaacgtctcagggctgctcaaaaaacttactgttgaaggtgtacatattaatataaaagatagttcaatagaaccaggaaaacaaactgatggacgttatattcctacaaccaaagaattagtattaaatacaacgcgcaaagtaatagatacaaatacaccgctacatgaattaggacatgcaattgatcacattttctttggatttgatattaagaaagatccgaagttccaacaaatcgtatctgcagagcttcaatcatttttaaggtcaaatggttgggagtgggacccacagtacgtagactattatagtaaaccagtcgaatattgggccgaagcatttgctcgatttatgacaaataatgaaaacctaaaaaaagaggcaccaaaaacatatcaatatattatagataaattaaaggagttatctttataa

SEQ ID NO: 35 - DNA, 927 bp, Artificial sequence
  Synthetic polynucleotide or polypeptide
atggaaaaaaaaagactgttgcttaaatggatgtgtggtttaacaattggaatcggaagtttgacagggggtagtttaaatgcttttgcggatgaagtctctgattctttagccgacgtgggttttctttatggagattatctttataaaactaaacaacatccactaggaacactacctatcacctatccaatgagagaagtcaataattatcaaataattgatagatctgtttcgcaagttgggagtacggaatacgaagagggcgaaactctgtttgttgatgatgatgtttttgacaataagacaggtactgatcaaacttttaaaacggttcagtttgaaaaagaattttcagaaacagccacatcgtcaacaacacattctgcgggtacaagcttagaagaaagtgtaaaatttgatttctttgttggtgaaggttcagccaagttcacagtaaactataattttagtaagacaggttctctctcgacaagtaataaaataaaatacacgttaccttctcaatcaattaatgtacctgctaacaagaaatatgaggttatatgtgttcttgaaactaaaaaagcaaaggctaatgttcaatttaacgtcgatgttcttggtaatgcaaaatatgtatatggcaataactcaccgtatacacctaaatacgaaagtggtgctactatggtgaaaactttaaatgaaaaaaatcctactcctagcgtctcttggttggataaggaatgggaaaaatgggaatatcatgatggtaaagcgagatacaaaaatggaagtgggacagtttcagctgaatatggtacaagaatggtacttgtaattaacgatataacaaataataaaacaagaggtagtaaagaaattgctagaatccctgttacaccaaccaaaaaacaaatataa

SEQ ID NO: 36 - DNA, 2100 bp, Artificial sequence
  Synthetic polynucleotide or polypeptide
atgaattcatatcaaaataaaaatgaatatgaaatattggatgcttcacgaaacaactctaatatgtctaaccgttatccaaggtatccactagcaaatgatcaacaagcttctatgcagaatacgaattataaagattggttggctacgcgcgacggaacacctgttcctttttctacttcttcacaactacttaaagttgcaggaaatatagttcctaggattttgggaattctccctacctttcttcctgggattggtcctcttgttccttttttaacttttttcactagtttgctttggccaagtggaacatccggaaataatatttgggaatcgttgatgaaagaagttgcggatttgatagaccaaaagttagaggaggctataatacgccaagcaacggctaatttagccggattaaaacaactattggattcatataacagcgctcttgctacatgggaagcaggcaatgcgactcctgagctggtaaaaagttatatggagagccttcatcttacgtttgtgcaggatattataggcagcttcacgataccaggttatgaaaaaatattattacctacctatgcgattgccgccaattttcatttgatgttattacgtgacattgaaatttatggaggtaaaaaaaccccagaaggtaaagatggcctgaattttgatccaaaagacctaaatttttataattgtgaactaaagcgtaatatggaacagtataagaattattgcttaaatacttacaataaaggtttggcttcagaaaaagaaaatggttgggtgcctttccatcgatatcgtagagaaatgactttggctgtattagatataattgcattatttccactctatgatgcaagactctatcctgctaagaataataaagaaatgccagttaaatccgaattgactcgtgaaatttattcggatgtcattaatagcgataggttcggagtggtacccccttataattatgctcaaaacgaagaacgttatacacgaccacctcatctcttcacttggttacgagggcttgactttgtaaccaatgttctgactagcggaacttgggtttatagatggagcgttttaactggttgtcaaaataaatattcttataccaaaggtaatggtactataactggtccttttcggggttatcctgtagagtctggtggaagaacttctaacattactattgaagaaggttcctatatttataacttgttgccaagaagctttgaatatatttacccttggtattttacgacaaatatcgcaatgattactttcttactaacaaataataatagttcaacagaaaaagtttatggttttctaacaggcaacgctaatttacctactgtgcaaacagattttgattttgttacaaataaagaagtaactggccctccaacatacaataactataatcatattttgtcacacatgttgctaggttatgattggaatcagacgggtggaataggcacacacggttatacatttgcatttacacatagtagcgttgatcctaataacaccattgccccagataaaattacgcaaattcctgcagtaaaagcttttgagatatcaagtacaggtacacatgcacctagcgtcatagctggacctggtgatacaggaggggatatagtaaagctaccatattcagcacgtttaaaaatacgtttaactcctgcaaccacgaataaaaattaccgtgttagaattcgctatacaagtggaggagttggtacgttattagtagaaagatggtcgccgagttctgtggtaaatgatacttttcctattccaagaacgggttattacggaccctatggatatctggataccttggttactacattttatcaatcaggtgttgaaataattatacaaaatctatctggtttcgattttgacgttgacaaagttgaacttatcccaattgatatcccaattgataaatgtacgaaatgtcaatacgtaggaggagtatgtacatgtagttgtccaacattacaatccttagacacagaaaaagaaattgtaaatagtttatttgtcgaataa

SEQ ID NO: 37 - DNA, 2013 bp, Artificial sequence
  Synthetic polynucleotide or polypeptide
atgaattcatatcaaaataaaaatgaatatgaaatattggatgcctcacaaaataactctactatgtctactcgttatccaaggtatccactagcaaaggacccacaagcttctatgcaaaatacgaattataaagattggctaaatctatgcgatactccaaatatggaaaatccagagtttcaatcagtaggaagaagcgcactttctatcctcattaaccttagctccagaatattatccttattaggtattcctttcgcagcacaaattgggcaactctggaactatacactcaacctactatggcctgtggcaaatgatgctaatcaatgggacacttttacgcgcaacatagaaggattaattaaaatacatataacagattctgtaagaggcagagcccttacagagctgataggcttaggaaacatattagaagactataagttggctttacaacgatggcagtcaactcctactgaaccaagcttccaagccgcagtgttacgccaatttgaaaatgttcatgccttttttcggtttcaaatgccggcctttgctgtagtggggtttgaaataccattattgccaatatatgcttctgcagctaatcttcatttgcttttactacgggatgttgtacttcacggagctggctggggcttggacagtggtacaattgacgattatcatgaacttcaattacgtcttatgtcaacatatgcagatcattgtgtaacttggtataccattggattaaacaggttaattggtacaaatgctaggcaatgggtaatttacaatcagttccgtagggagatgacaatatccgtactagatattattgcattattttctaactatgatactcgtagatacccaacaaaaatacagagcgagctaacaaggatgatttatacagatccaataggtaccgaagagaatcaatttattcccgggtggttagataacgcaccttctttctcggtcatagagaatagtgtagttcgaagcccaggagctttcacatttctggaaagggttggtattttcacaggattcttacatggatggagtagccggtctgagttttggtcggcccatagattattttctagaccggttttgggtgggatatgggagagtgttatttttggcaatccccaaaataatattgggtatcaagaagtggattttacgaattttgatgtatttagcactacttctagggccacttctagtatgtccccattcggaggtggtgaattatttggagttccacgagttacatttgatttatcaaatgtaactaataatagtccagcacaaaggacttataacagaccatttacttttgggggccaggatatagtgtcaagattacctggtgaaacaacggaaataccgaatagtagcaactttagtcacagactagcccatatttcgtcttttccagtaggtaacaatggatcagtcctctcatatgggtggacacaccatagtgtgaatcgtcataatagattgaatccagacatgattacacaaattcctgctgttaaggggataagtaacctcaatatggttagaggtcctggacatacaggtggagatattctaagggttaacagaaatagccaggggacaatatttatccaatcgaattcagcacaaaggtatcgtctacgtttgcgttattccagctctttaccaggtgatttaattcttaatcatataggatcagatggcagccaacagtttattgaattcacacttcccgctacatcaggtcagctaagatttgccgatttcacttatgcagacggaagaacggtctttcaaactccaaatagtcatgtattttacactatacatgttcaaccaatatcggatgcaaccgtttttatagacaaaattgattatatcccagaaaatacacccactttagaacgtgggggagaacgaaatctagaaaaagaaaagaaagcggtggacgatttgtttaccaattaa

SEQ ID NO: 38 - DNA, 2886 bp, Artificial sequence
  Synthetic polynucleotide or polypeptide
atgagtaattctatggtaccttataacgtcttgagaagtatagatatgccgagtatatcaggaaccaagtgggacaaagagatgattatcaatgcatttgataatacctcttttcttttagagcttatagaaaaaggaattaatgatggcgacgatgtgttaggtttgttaagttttattggattaacagccttagaagcaattccaattgtaggtggagtgatttccagcctggtttctatgatatttttcccgacaaaatctagcattaactaccagaaaatatgggagaaattaaaattagctattgaggaaatagttgatcaaaaaatagaagaagccttgatgtctcaactaatgcaagaaatagctggtatggccaatgtattagaagaatatagagatgcatatgatttatatactggtaacaaattctttgatataccagataggctgacatctggagaatatctgataaatgtatttactactgcgaatctacaatttatccagagaataccaatattccagaaccctaaatatgatgtgaagtttcttccattttttgttcacgctgctgaaatgcatattctcctagtaagagatgcagcaatacacggtcttgaatgggggatggatgaaaaagtacatcaaaaattcaagaaagatttaaagaatttgatagataaatattatgattatttattaaacacatataaaaaaggtttaaaagaggcttctgaaaggccacttaaaactagtgattttccaacatctaacaaccaacatcattatactaatacagttagatggaatgtaatcaatcaatataaaagagggatgaccttaactgtctttgattttgcacacaaatggaagtattaccaagagatttatcagaataatgtaaagttagatccagttcgaacaatttattcggatattgctggttcggtatatccttatgacaaaattacaaatgaaattgataattttatcaaagaccagaatcttaaatatcgcggaatcttaaaaaaactacaaattaatcatgcagatagaattgatagcctgcaaagtacttatataaggaataatgaaataattaatagtaaaaaaattgggggttctggtggaagggaaacacgtattgatttaaactctccaataaataatccattcatacaagtaaatatgtggtctgaattagtaccattttctttagggttcaaattttataatggagaagagccgaaacctatatggggagcaggaattcctcaagaccctacaaaacacaagtttggtgcttatcattatgtagggaataaagtgtcttctattataggatttgggaaaaatgaaaccggtggattcaactctttagatgcaatggtagttggttttagacgagacgattatatacctgaaaatagatttgttggtgtaaacacaaatggtgaacctgtcactaaggtaatagatgtaggaaatttctatcaagagaagtttcaatcaaatataaaaatgattgatgaacctatgtttggagatggggttttgcgatttgagaattattccaacaatcttaatcaggatagttatgtgacatataaaattcatacagagatagagggtacttacgaattaagtgcagttataggtacaaaaaaacaaaaaggtaaaatagcattaaaagtagcccttaatgaaaaacaaccagaaaatattgtaaccggatcatttgatgacggtgatatatgggacggaatatcattgagtgaaggattagtttataaaagaatattattaggaagtttccaacttaagaaaggtatgaatagtataactatccacaatggaactcttcaagcatcagcaaatataaaaacctggaatttagcttcgctagagttaacaatcaatactgatagcctagaaaattcagatataacaactttatatgataaagataattatactggagcaaaggagcttatttttgataatacaagtcgcttaaaaggctttaatgataaaacatcttcaataaaggcagcatcagatatagctggtattagggtttatcaacattatgattatcaaggggagtctattgaccttgttggtggagaaaaaataagtttaaaaaatcattcatttaataaaaaagcatcttcagttaaatttgctaatatcgttttatataaccaagataattataaggggtcaagaaaacttatttttgaagatgctcctaagttaacagactttaatgataaaacatcttcaattgttgttagttctaatgtatctggtgttaggttctatgaacataatggttatggtgggagatgtattgaccttgttggtggagaaaaaataagtttaaaaaatcatgtattaaatagaaatatttcatcaattaaaattttaaaagatgatgagatacctagtggtgtataccaaattgctacttcaataaacaatacaagtgttatagataaacatttaaaaaataatacagttcatttatgggagaacgcaggaaatgacaatcaaaaatggatagttgaatatgatgtcgctaaattagcgtatcaaattaaaagtttttataattcaaatgtaactttaacctattctacaattaatagaacccttacatgtgattataactataaacttgatgaacaatattggatattccagcatgtgggggaaggggattatattattaaaaataaatataatactaaacttgtgttagatgtgcacaatgctaatcctacaaatggaagcgctattaaagtacaagaacagcatgatgtaaatagtccgcatattattgcacaaaaatttaaatttagatataaaaataattaa

SEQ ID NO: 39 - DNA, 2016 bp, Artificial sequence
  Synthetic polynucleotide or polypeptide
atgaattcatatcaaaataaaaatgaatatgaaatattggatgcttcaccaaataatacaaatatgccaaacagatatccttttgcaaaagatccaaatatatttcctattaacctgaacgattgtcagggaagctcatggcaagatacgtgggaagcagtccagagtatagtaagtattggggtagatcttatacaatttatattagcacctggtttaggtggaattaatatactattgtcaataataggtaaactaattccacctaatcgtcaatctatttcagcactttctatatgtgatttattatctataattcgtaaagaggtagatgagagcgttttaaatgatgcggttgcagattttaacggtaaattgactaattataaagattattatcttaaaaggcttgagaattggcttaaagcaggtaaaccaaatgatgatagccttaaagaattagttgcacaattcaaaatttatgaatcaggtttcaatgaacttctagcagggtcattatcaagaaataaaggtgaaatattattattgcctacttttgtgcaagctgcaaatgtgcagttattattattaagggatgcagaaaaatataaagatcaatggggagcatttttgcaggcggagaaaataggatcggaattaatatcacctactaatttttatgaaggtcgattaaaagcgaaaatagcagagtataccaattattgtgtagagtggtataacaagggtttagatcagataaaagagaagggtacaaatgctgaaatttggtcgagatttaataaatttcgtagagaaatgacgttggcggtattggatattatcgctatatttccaacttatgattttgagaaatatccattagaaacaaaagtagagttaactagggaaatttatacagatccagtgggatattcgagttgggaagaattttttagctttaattccctagaagctaatggaacacgggaacctggtttagttacttggcttcaagctatagatatatatagtcattcttttagggttttacttggtgattttaacggctggggaggaactcgtcattatgaatactacacaaggggtaacggtacttctcaacgtatgtctggaactacgagtaatgatcgacgtcatattaattttggcactaccgatatatttaaaattatttcattagctagcactggcaccccactacctgggttccccattatcccagggtatcttgtttcacgtgcagaattttttctgtcaacacaaaatactctcctgtatgaggcaaacattatggggagggtacagacaattgaatctgtattaccaggtattaataaggatctaccacctagtcgtacaaattactctcatagattatcaaatgcggcatgtgttgtaagtggtgcaagtgtcaactccagagttaacgtatttggttggacacatacaagtatgacacaaaataatccaatttatacagataaaatttcacaaattccagcagtaaaatcacatcatatatttactttaggtagtagtttagttcaaactagtgtaataagtggacctggtcatactggcggagacctcatagaaatggggacaggagaaagtggtttcgaaatgatattaaactctacagcaaggcaaaggtatcgtgtacgtttacgttatgtaaatcctcatcgaaatccgattgatggtcaagtacactttcctgattcgaatattacttgggattttagattaccagctggtacttcttacaatccagatttaccatacagtgaattccggtatatagatgttcctggagtattcgagacagctaatactttatcaaattggcgctttgttgtagcgattaggaatggagcaagatgtgtaattgacaaagtcgaattcattccagttaattctacagctttagaatatgaaggaaaacaaaatctagaaaaagctaagaaagcggtggacgatttgtttaccaattaa

SEQ ID NO: 40 - DNA, 1959 bp, Artificial sequence
  Synthetic polynucleotide or polypeptide
atgaattcatatgaaaataaaaatgaatatgaaatattggatgcttcaccaaataatacgaatatgctaaacagatatccttttgcaaaggacccaaatatatttcctattaacctgaacgcttgtcagggacgcccatggcaagatacgtgggaatcagtctcggatataataactattggggtataccttatacaattcttaatagaacctggtataggtggaattcctgtaatattgtcaataataaacaaactaattccatcttctggtcaatctgtggcagcactttctatatgtgatttattatctataattcgtaaagaggtagacgagagcgtgttaagtgacggggttgcagattttaagggcgaaatgactgcttatcgagattattatcttccttatcttgaggattggcttacagataaatcaaatcctgacaaacttgctgacgtagttaaacagtttcaagcacgggaagaagatttcactaaacttttagcagggtcattatcaagacagaaagctgaaatattattattgcctacgtatgtgcaagctgcaaatgtgcatttattactattaagggacgcagttaaatataaaaaagaatggggactagtgtgtccaccgttgtatccagggtcagggaaaactgattgtaacgagcggttaaaagcgaaaataaaagagtatactaattattgtgtagagtggtataacaagggtttagatcagataagacaggcgggtacaagtactgaaacttggttgaaatttaataaattccgtagagaaatgacgttagcggtattggatattatcgctatatttccaacttatgattttgagaaatatccattagaaacaaatgtagagttaactagagaaatttatacagatccagtggggtattcaggaagcagtattcgttgggaatggactttccccaatgcttttaatacgctagaagctaatggaacacggggaccgggtttagttacttggcttagcagtataagtatatatagtcagtattttacggtttattttagcggctgggtaggaactcttcatgctgaagattatacaaggggtaacggtactttctatcgtttatctggaactactacgagtactgctccacgtaatttgctttttagcccttccgatatatttaaaattgtttcattaggtatctatgaaacaagagcagagcttggatacacacggcaacggttttgtgtttcacgtgcagaatttagtacgtcaacaccatataaatacctgtatgatgcaaataataatggacaaggccgaatgacaattgaatctacgttaccaggtattgagaatccagaacctagttatacagattactctcatagattatcaaatgcggcatgtgttcaatttaacgactccagagttaacgtatatggttggacacatacaagtatgaaaagaaataatccaatttatacagataaaatttcacaaataccggcggtgaaagcttttgctttagaatcaggcgcttttgttagccgtggacctggtcatacaggaggagatgtagtaacgttaccagatagagggcgtttaaaaatacgtttaacttctgcacccacgaataaaaattaccgtgttagagttcgctatgcaagtttgtatcctggtcgtatagtggtacaaagatggtcgccgagtgctattacagatagtccttttgttttttcatctacgggcgctcttactacatttgcctatgtgaacaccttagttactacatttaatcaaccgggtgttgaaataattatagaaaatgatagtgcagtcaacattatcattgacaaaattgaatttatcccagttgatctaacaactttagaatatgagggagaacgaaacctagaaaaaacaaagaacgcggtgaacgatttatttatcaattaa

SEQ ID NO: 41 - DNA, 1425 bp, Artificial sequence
  Synthetic polynucleotide or polypeptide
atgaattcagaacaacgtaagcatgagcagaataatgaatataagcatcaaaatcatggtgtatcttgtaattgtggttgtcagcaaggtaaatatgaatacgagcaaaaacaaagtagggaagaatataacaatcaatatatgtcaaatggacaaaagcaaaatcatgaaaataaaaattattatagctgtagtccaacacaatttaatgcacctaatttacctgatgaaagcaaaagatttcaaacgattacaaatattaatacgaataataacggtcatcgtgttttagatgcaatgaacacgactgtggggcaagagcttgagaggggctatgggaattgttcaagggtaagtgttgcaaatacagtagttaatgaacaggttcgatttttgaataaatctcaactttttgttttttatcaagcagatgctggtgatttttttattgctaataaagggaatgggcgagtcttagaagttatacctaatagtacacatggatatttagtaatctctaatttgtatgatggtgctaataataaccaaagaattagaaaagaaaatgtaactactactaattttagattaagatcacaagatgcagtaataaatatatgtggtcacaacatcaataggttggtatcaattactgctatacaaagtactgccgaaacattattccgattcagacctgaaaacatggataatatctcgcttccaacactaccaactggaggaaggttaggattaccacctgtattaacgagtttgaatgattcaggtccaagtccaagtccaacaggtccaaatccagcaccacgagcaaatataggaagtgcattgataccatgtctatatgtaaatgatgtacttccaatagatagaagaatggaagtaagtccttattatgtattagaatatacacagtattggcatagattatggtcagatgaggttctttctggagatagaggaggaccttacgaagaaataacagggatacttcccaatgcacaagaaagcatgagaaatatgatagatatgacaataggtgaagattggggtttaagatttggaagtaactcgactccttttaagagggggattctaagtagcttaaataatcttgagtcctatgctgctagggatttaggatctagacattcgagttatggatttacaaatttcaatccatttccagttagatattcaagatttgtaaaagcgcatgagtatacattgaagcgtatggatggaacagtagtaacaacaccatgggtagcattagaccatagaagtcaatatttgcctagattccctctaaacgcgacagtatcattacaagattataaaataataagcagttatagcagttatgatttgccagtattagaaaacatcgatgttaataagagatggtga

SEQ ID NO: 42 - DNA, 1530 bp, Artificial sequence
  Synthetic polynucleotide or polypeptide
atgaatggaaatggtagaaatgagaatggcacttatcatcaacagatgtcagatgaatatatgaaacaaaatcataatggatcttgtggatgtggttgtcaacaaaacaacaatggatcgtatccttctaatgggtatagttcaaacaataatggatcatatccttctaatgggtatagttcaaacaacaatggatcgtatccttctaatgggtataatgcaaacaacaatggatcgtatccttctaatgggtatagttcaaacaataatggatcatatccttctaatgggtataatgcaaacaataatggatcatatccttctaatgggtatagttcaaacaataatggatcatatccttctaatgggtataatgcaaacaacaatggatcgtatccttctaatgggtatgtaggaggatatagtgtattagatgatttacctcaggtaagtaaacaattccagactataggaactatacatactcctcttcctgttcttgatgcagcaactaatagtatatatgatttgttagatccaggaacaaattattgtcaagaaataggtgttcctaatacagttattaatttgaactctaatggtacagatcggcaaaaatttattttatatgtaaaagatgataatggatatattattgcaaataaagaaactggggaagttttagaaaatagagtagaaattgaaggtagacctcaatggatagcagtatctagaccttataatcctgataatccaggtcaaagttttaaattatcatattcagattcaaatccagaaaattttagattagtatctgaaaatcgagcattaaatatatgtgataataattttggttctagaaccaaaattacatctattcttgatcaaaattctaacaatttgttatttaaaattaaagatacagaatctataacatttccaaatatggtagtaaatccgcaaccattgccagaaccagggcaattaaataatataaatgataatcctgttattccaagagcaatacaaggaaaatcattaattccaggtataatagtaaatgatccaaattttactttagaacaaaggataaaaaataatccatattatgtgttagagtttacagaaacttggtataaagcaactgattctattatagatagccagggtgttagtatttggattgaatataagggtattacatcatttgatcaaaataatatgaaagatattgtaaatatgtctataggtggttcattgttaggttggggattcaagtttggcaatacatctgctctttttaaaagaaccattacaaatggattaacaatagtatctgcttctcctgatgataatgaaatgcaatttgaagaatctatacaaaatgaatataattttacaaattctcctaagagatttataaaatatataaaagtctatgagttagcattgaaacgtttagataattctcaagtatctaaatggatgatatatgataatcgagtttttagtataagaactcgccaataa

SEQ ID NO: 43 - DNA, 2136 bp, Artificial sequence
  Synthetic polynucleotide or polypeptide
atgaatcataataataatgaatatgaaattgcagatgtaaatcccccatcttatccatctaacagaatcaataattattctagatatcctttcgcaaatgacccgaaccaattattacaacaaactaattacaaagattggctcaatatatgtcaagggaataaccaaaatagtgggaatctaataacagatgcaggagctgcggttagtgcgggcataattgtaactggcacaatgatagcggcttttgctgcacttgctgttgctccttttcctatagtaggtgctatagtaggtggtatagtaatagcttttggaacactattaccccttgtttggccaggtggaaaggaggatagaacggtttggactcaatttttcgcacttggagaaacacttttgggtaaaagattaactgatgacgcacaaaaaactgcagctgaaactgtggatgggtttgggagagtattagacaactacaaagttgcacttaatagttggatggatttgaaaaagaaacaaagtcctggttccccgccaacgacagagttaaaagaagctgctgataatgttaaacaacgatttgaaattgtccataatgaatttgatgcgaatatgcctcatttagggaatcctaaatctaattataaagaagtgttattaagttcgtatgcacatgctgctaatctgcatttaaatttattacaacaaggggttagattcgcggatcaatggaatcaagatatatattcttcacaaattgtacctgctgctggaacatcaactgagtatcttaaattcttgcaggcacgtatacaggaatatgttaattattgtacagcaacctatagaagcggcttaaatatacttaaaaattctaatgatatcacatgggatatctataatacatatcgtagagatatgactcttaccgtactagatttagttgcagccttcccaaattatgatccaacctactatccaatagataccaaaatacaacttacaagaaccatttattcaaatttacttgggataactcagtctgggaggcaatatttcgaggcactggaaaacgccttaacaatgagaccgaatttgtatagaatactaagaggatttaactttaatacaacatttggatcaggtgttaattatttatcaggtattgcaaacagacgcggtcttattaagactgttccttcagaggaggatgagcaacctttttacggacaatcaaatggtcgtcatgatccaatgatttttgcaaatggactaaatatttttcgagttactcttttaagaaacaaacattatattgcacttcccgtaggacctcctttatttgcagctaatcaaatcacggatttaaaactatattatggaaatgcaacacaataccaccattatcaaccaagcaatgaaggtcttactactgaaagtacagacctctcatttcctccaaaaaacgaagagtatttaaatgcaattttgatgacttcaccaagaactatatacgaaaacccaacaaatatatactcatttgcttggacaaaaaaggatatagatcaacaaaataacattattataaatgcaatcacccaaatcccagctgtaaagggtattgcattaggtaatcaatcccgagtcattcaaggccctggtcacacaagtggggatttagtatatttaaaagatagtttagaacttagatgtcaatacactggtcctcaacaatcttatgatgtacgtattcgctatgcctcaaatggtatcctgaatgatagggctatgatagccattacaatcccaggggtaacaggacaatccatttcactcagtgaaaccttttcaggtacggattataatgttttagaatttcaaaactttaaatcggttcaatttactagtgcaattcgattaaatcccagccaaaacatatttatttatttgaatcgtctagatcaaaatgcaaatacaactttgttaattgataagattgaatttatcccacatccattaccacgtattctatcagaacaaaaattaaaaaaggtgaaacaaaaagtgaatgacttattcatagatgctgaaaatgggtgtttttgcccatcccacgaaaaagacctgcgctaa

SEQ ID NO: 44 - DNA, 1680 bp, Artificial sequence
  Synthetic polynucleotide or polypeptide
atgtttacaagtggcgcgaaaaatacgttgaaaatagagacgacagattatcaaatagatcaagtggcacattctatagaatgtatgtcagaagaacaaaatccacaaaaaaaaatgatgttatgggatgaaataaaacaggcaaaacaacttagtcggtctcgtaatttactccacaatggtgattttgaggatttatttggaggctggacaacaagtactcatattacgattcaggtggataatcccatttttaaaggaaatcatcttaatataccaggggcaggagatattgatgggacgctattcccaagctatatctatcaaaaaatagatgaatccaaattaaaaccaaatacacgttatcgagtaagagggtttgtgggtagtagcaaaaatctaaaattagtggtaacacgttacgggaaagaaattgatgctagtatggatgttccaaatgatttgatgcagcctaacctttcatgtggggattatcgctgtgactcatcatccccgtctatgatgagtcaagggtaccctacaccatatacagatagatatggtgtaggatacccgtcaaatcaaggtaaaaaacgtgtgaagtgtcacgatcgtcattcatttgattttcatattgacaccggagaattagatataaatacaaacttaggtattttattcttatttaaaatttccaatccagatggagacgctacagtagggaatctagaagtaattgaagaaggaccactaacagacgaagcattggcacatgtgaaacagaaagaaaagaaatggaatcaacatatagaaaaagcgcgaatggaaacacaacaagcttatgatccagcaaagcaggcagtagatgcattattcacaaatgtacaaggaaacgaattacactatcatattactttagatcatattcagaacgccgatcagttggtacagtcgattccctatgtacacaacccttggttaccgaatgttacaggtatgaactataatttatatacaggtttatatgcacgtatacagcaggctcgctatttatatgatgcacgaaatgttataactaatggtgactttacacaaggattacagggatggcatgcaacaggaaaggcagcggtacaacagatggatggagcttctgtattagttctatcaaactggagtgcgggggtatctcaaaatttgcatgcccaagatcatcatggatatgtgttacgtgtgattgccaaaaaagaaggacctggaaaaggctatgtaacgatgatggattgtaatggaaagcaggaaacacttaaattcacttcttgtgaagaaggatatatgacaaaaacagtagagatattcccagaaagcaatcgtgtacgaatagagatgggagaaaccgagggtacattttatatacaaagcatcgagttgctttgtatgaaagggtatactagcaatcacaaccaaaatacaggtactatgtatgagcaaagttataatggaaattataatcagaatacgagcgatgtgtatcatcaagggtatacaaataactataaccaagactctagtagtatgtataatcaaaattatactaacaatgatgacctgcattccggttgcacatgtaaccaaaggcataactttggctgtacatgtaatcaaagatataaccgttaa

SEQ ID NO: 45 - DNA, 3684 bp, Artificial sequence
  Synthetic polynucleotide or polypeptide
atgaatcaaaataatcaaaatgaaattcaaattgtaaatccttcacccaatgattttaatcaatcaaataggtatccaagatacccattagctgaagagtcaaattataaagattggctagctaatggtaaggaatccaatcttgatagattatcaactccaagttctgtacaggatgcagtcgtgacaagtttgaatgttttttcttacatctttggttttctagatgctggagcgacctcggcaggtcttggtatactaggcacgttatttggtgtgttttggccatcaaatggtaatgggatttcggaggatcttttacgtagtatcgaaattttaattgatcgaagaataaacgaagtcgagagaaaccgtatcacagtccaatttgaaggcctaagagcagttatgtcgaattataatacggcattgcgaaattggaatgcaaatcgtactaatgaagcacttcaaagggaagtaataaaccgctttgataatgcagatgatgcttttgcaaatcgtatgcctgaatttagaatatccggttttgaaatacaatcgctatctgtatatgcacaggctgcaactctccatttattattattaagggatgctgttgttaatgggagtatatggggatttgagggaacaacgattgaaagtctttatactaaactagtatgtctgattgatgcatatacagatcattgtatttccttttatcaacagggtttgcaagatttaagaaacagagggaattggaatgcattcaataattatcgtagagacatgactattactgtattggatatcatttctttattttcaaattatgatccgcgtaggtatccaataaatacaaagacacaacttacaagagaagtatatactgaaccaatttcttggtctaattggcgggatagatattctaatccagatcaatttcaacaaatagaaaatgattttaatccttcaccttcattgtttactactctcactaatctttctgcaagaacagggtttttcatatacgaagacctgcatacaagtagggatgccatattaaatacatcaatgcgtcttactccaataggtggtacttctatcagtactccttggcaaggtgcgattaatgctaatatttcacaacaacgggaggtggactttcacaattatatagcttatagtgtcgattcagtaatatctaataatgatgtaatcaatttcattgggattcaacgagttgtttttttcatgctaaaaggaacaacaccatttactcgaagtattgatctaccattaactagatattttgctactagaacatctaatataccaggaacaagatcagcaacaccaaccgctttagattatacccataaactatcttcgataagatcaacttcagttggaatcccatataggaatagatcgaatattatggcatatggatggacgcatactagcgtagaagaaacgaatagacttctaccaaatcggattacacaaattccggcagtaaaagcagctcaattatttaataacgctaatgtaataagtggccctggtcatactggaggagcactcatatctatgagtggagatagtagcatagcgatgtctgtgtacaattctagtaacacggtgtatgctatacgtatacgttttgtgaatgactttaatgatgttgagggtatattggcatttcaaggcaccggcattgctctgactgttaagtttccaggtagtggagccgcattaaatccggatttaccaatcagtgattttcgctacgtaactattcctgcttatcctttaatacctggttatgctacttatcaagttactctgacgactagaaatgcaacaggaacatgcttaattgacaaaatcgaattcatcccatatagcgctagagctttagaatatgaaggaaaacaaaatctagaaaaagcaaagaaagcggtgtacgatttgtttaccgataatggaagagcggctttaaaagtagatacgacggattatgatgtggatcaagctgcaaatctagtagaatatgtgccagaggaactgtacacaaaagaaaaaatgattctacttgatgaagtgaaacatgccaaacaactcagtgcatctcgtaatctgattcaaaatgggaactttgaattttatacggataaatggacaacaagtacgaatgtaagtattcaagcggataatccgatattcaaagggaactatctcaatatgccaggggcgagagagacaggtacaactgcgttcccgacgtatgtattccagaaaatagatgaatccagattaaagacatatacacgctataaagtcaggggctttgtcggaagtagtcatgatgtgaggttaattgtggaacgttatggtaaagaagtggatgcaatcctaaatgtaagaaatgctttagcccttgataccgtagctccttcctgtattgaagctactcaaccttatcctatcatccatgatggatgtctcacgaacgtaatagatacaaatccttatgaaggggctcagtccggtcatgctaacttcaaaaaagaacatggaatgtgccatcagtctcatcaatttgaatttcacattaatataggtgaaattcatataaataagaatccaggtatttgggttctgtttaaaatttcttcgccagaaggacacgcaaccttagataacattgagttaattgaagatggtccgttagtgggagaatctctagccctcgtgaaaaaacgagaaaagaaatggaaaaatgagatggaaacaagatggctccaaacaaaagaagtgtacgaaaaggcaaaaggggaaatagatgccttatttacagatgcacaagatcaagctttaaaatttgaaacaaacatctctcacattatttcagcagagcaccttgtacaatctatcccttatgtctttaacagatggatatcagatgtgccgggtatgaattatgacatttatacagaattagaacgtcgtattacgcaggcatactctttatatgaacgtagaaacatcattaaaaatggagactttgatcatggtttaaatcactggcacgcgacgcttcatgcgaaagtgcaacaaatagatggtacagctgtattagtgattccaaactggagttccaatgtgtctcaaaatctatgtgtagagcacaatcgtggttatgtattgcgtgtaacagcgaagaaagaagacacgggcaaagggtatgtaactattagtgattgcaatggaaatcaggaaacacttacgttcacttcttgtgataattatgtatcaaacgaaatcacaaatagccaatcggagtatcatttcagtcaagagatgaatgaacgacgtagttataatccaaatgaaaccataaacgagcaattggattatagtctaggtcaagtaaaaaatgaacaacgttgttatactcgaaatgcgatcccaaatgaccagtcggaatatcattttagtcaagagatgaatgaacaacgttgttataatccaaatgaaaccataaatgagcaaaggaattatgtaacaagaaccattgatttcttcccagatacagatcaactacgcattgatattggagaaaccgaaggtatgtttaatatagaaagtgtagaattgatttgcatggaaggccaataa

SEQ ID NO: 46 - DNA, 1962 bp, Artificial sequence
  Synthetic polynucleotide or polypeptide
atggattcaaatgctaaatatgaaatcatgaatactaaatacaatctctcacataagggcaataggtattcaaggtttcctttagacaatactcagtataaaaaattgcaaaatatgaattacgaagatatgttgacagattatctaaaaaatagaaattatgcagagcttcctattgtaacaaatgttgattggtcagctgcatcttctgcaattttaattgtgattggtacttttctaagcatatcttctgcagttcatggtgccttcatcatatcattcggaacattgctgcctttgttttggtctgatatttttccaggaggaaatacatggcaaagtttaattacacaagttgaaaccctaggcctcggtcaaaatttaacacccacttttttacttacagtcaataacgaattaaacaggatacatgggtatttaagtctatataatgatatttttaattattgggatttaaacaataacgctaataccagagaggcagtgcgtaatgcatttgcgaatgctaatgcagctattattggaagtatcaacatacttgcaacaccgggctataatatcgtatctctttcttcctatgcatctctcgcgcttatgcatttaaacctacttagtcaaggagtttattatgcagagaaatgggggttaatccgagaggatggagcattttacaaggatctgttacaaaaacgaataaaaatgtatgttgattattgtcaatctacgtatcgatcaggtttggaccgcctcaaaactggcacgttagagggtgcatggatctattttaatacttatcggagggaatacaccatttctgtactgaatgttgttgcaacatttagtagatttgacccagacatatatccttatcatttaaagactacacctcaaattacagaaaagattcatgttgcaacacgtagtagttctgatacgttttatgcgggatttccagatctgcaaaaagtggaagaaaacctggtacctaaattagatttatttaaaaggttaaagaaattgaatttttacacaaccagtcacctcttaacaaagtatatgagtcaaattacaaattcttacgattacacggggggagagtttgctggtacttttactaccaatgggagggagaattcccgaaatccggacggtgaggttcaaactccttggttgtaccaatgtgaatacaatcagattttggttgacttcttccccttcaccgacccggattatggcattaacaaacttacaatttttccgagggaccctctaccaccttatatcgcttatgatacaaggttacccctcgtacgtacaaaaactgttactgtaccacctcctataccaccttctctaccaaaagacgtggtcccaattagatatatattatctgatatgactacaattgattcacatccgtatcacgcgaatcttttatataattttagttggacagttgacagcgctaatgctgataatgtgataaaaggagaatatcatattacacaaatcccagcagtaaaaggtgataagcttgaaaacggtgctacagttaaagaaggacctggccatacaggaggaccattagtcgtactgggcccaattgcagcaggaggctttcccagagtaaggataaggtgccaagtatcagatgcggctgccaataaatatcttgttatgaggattcgctatgcttcaatttcaaaagttaccacgaaactaaactttcaaataggggatcagtttcttagtcaagattgtccagggacagaagcggatataggaaaaattgatataccgtacgataagtttaatacttttaccgttgaaccaataataactcctaaaagtgctggacctatgaatgtgtatatagagaaagttagtgccatcactcacacatttcttattgacaaaattgaattttatatacgtggttaa

SEQ ID NO: 47 - DNA, 1911 bp, Artificial sequence
  Synthetic polynucleotide or polypeptide
atgaactcatatcaaaataaaaatgaatatgaaatattggatacttcacaaaacaactctaagatgtctaatcgttatccaaggtacccactagcaaatgctcctcacatgcctatgcgaaatacgaattataaagactggataaatatgtgtacaaataataaccttaatcctatagaacctttagaccttacctggcaaaatgctcttgtttcagtctttggtatcgctgcagctgttgcaggattgttagcagctccaattactggcggaacatctatagcagcgggagcggctataatagctaatatattaccattaacctttcccgctaatgatactagtgttcccaataagcttatggcggccacacaaacattacttggccctctagatgaatatgttagaaatagagcaaattcagagctactcagtttgagttcacagttagaaggttttaaaggcctatttgattattggctcgaaaaccgctcagatccaaatgtaattaatacaattagtcagcgctttactacaattcatgttaatttacagggggcaatgcaactttttaaacagccggggtatgaagccttactgttaccggtatatgctcaggctgcacgtttacatttgctccatttaagagacggtatcacgtacgctgatgaatggaggttagctgatccaactaatgcaactaatgcaggagagtaccactatcgtgaatttaagcaatatgctgcgcaatatgcagatcattgtgaattagtagttaataatcaactaaacacgataaaaaatacccctgggaaaacatggatagactataatgaatatcgtcgaaagatgatattatctgttttcgatattgttgctgaattttcaacctttgatccaattttatataacggagcgataaatagagagattttaacaaggaaaatatatacagaccccgttaatttcacacctggttcttcaattacagatgatgaaaatagatatacagtcccaccatcaaatgttaagcaattagttggctcaacattatatactaacgtggcatctgctcagtatgctggatttattggaaataaaaatcgttatttaaatataggtggtagcgagccatttgacggtcctttaatcggaaactcagtatacgaaaataggatagcaggtataccgacaaatgaatgggtttatgaagttggtgtaaatggtatacagaatgattatccacgtaatataggtttgagacggggttcgtcaactgcatttcaaaatttttatgctggaggtacgactaatttaggtcctttaactagagtctctgtgccaactaaaaacaatgacccaataagtaatactaattttactcatcgattatcagatataattctccctggaaatagtggctcatcatttgcatggactcatgttgaggtcaatcctacaggaaactatttatcaacaaatcagattaatttaatatctggtacaaaagcttcaacatatccagcgataataaagggaccggggtttataggaggagatttagtcaaagcggaatttgccacaaattctaaaggtataacttatcagcttagttccagatcccctggtagcccaactagttatagagttcgtttacgttatgggtctaatgctcttggggttatgtattttaaatttgggaatataacgtctcaacagcaggaaattcgtcttactaacttaaatgttgctaattataagtatgatcattttatagtagtagagttttttacaaatgtagtaattagtacacaaaatgaaatgactatttatgtaaatttatcatcgtcgggttattttgtactagacagattggaatttatccctatgacaggaattccaacattatag

SEQ ID NO: 48 - DNA, 2064 bp, Artificial sequence
  Synthetic polynucleotide or polypeptide
atgaattcatatcaaaataaaaatgaatatgaaatattggatactgcacgaaacaactctaatatgtctcctcgttatccaaggtacccactagcaaatgacccacaagcttctatgcagaatacgagctataaagaatggctaaatatgtgtgattcaaacacacaatttgttggtgatataagcacctattctagtcctgaagctgctttaagtgcacgagatgcagttttcacaggtattaacgttgctaatagtatactttcacattttggatattttggggtcccttttgctggtttttcatttcaattaattggtgcgctactaggtattttatggccgggacctgacccatttgcagcacttatggttcttgttgaagagcttattaatgacaggataaaggatgaaataagagaacatgctcttttagaattagcgggtttaaaggatattatggatctatatcgaactagatggcttgcatgggaccttaataaagataatcctgacactgaaattcgagagagagctaaagaggcagtacgattgcagtatcgaatcgctgataacttttttatacaaaacatgccaaaatttgggcgtgcggaccatggggttttattgttagcagtatatgcacaagccgcgaatttgcatttaattttattaagagatgcagatgtatatggagaaaagtggggattaggtcctgatgaaattcgtgataattatattagactacagaagaagattagagagtataaagatcattgtgtaacattctataatcagggtttaaatcgatttaatcactcaaatgctcaagattgggtgagctttaataggtttcgtacagatatgacaataacagtattggatctagcaacattatttccaaactatgatccgcgcatatatccatcggcagtaaaaacagaattgactagggaaatttatacggacccagtaggatatactgagagaggattgccttggtataatcctaataatacgacctttgctactatggaaaataatgcaatacgacgacctttttttaccacgtggcttaatagaattcaaatatttacaggtcatctaggaaatttttctgctgcgagaaatgtttggggagggcatgtattagttgaaagtgcctctaatggtcgtgaaatatattatgcatatggtaatacggatacctctactactcctgttagaaattgggatttcacaaatcagaatcgtactgttttcagtattgtttcaaatgctcaagtgtatgcaggggggttaccgccttatcttgagagtcagtatggcgtctctagagttgatatgcatacagcaataaatggtaattcttttggtggacagtttatatacgaagtacctaacgttctcctaccccaagctattgtatcagaattaccaggagaggatcagcaaagaccaaccgcaagtaatcacagccacatattatctcatataacaaaatttgatgcacgacgaggtagtggttctggcggcaacgttcatcttttaacatatggctggacacataccagtatggatcgtaataatcgtcttgaacgagatagtattactcaaatagatgctgttaaaggttttggatcagatattgtgtctgtcataccaggacctactggaggaaatttggtagtccctatgagttctgacttttcccttagagtgcagccaccacaaatagaaacacattatcgtattcgtttgcgttttgcttgtgtatggccggggacgcataatatgtgggtaaaccacggcggtatttcccaccctgttcaactcttatgcaacaatgcatcaggtcgcccatcaaacaatcttctagagagcgattttggctatgttgttgttccaggtactttttcgccatcaataaatcccgaaatacgattttcagctatcaatggtacccccgtgctagacaaaattgaatttatcccacttgacatgtttaatgagctatttccaggagatagagaaaagacagtaaatgatctatttatcaattaa

SEQ ID NO: 49 - DNA, 708 bp, Artificial sequence
  Synthetic polynucleotide or polypeptide
atgaatcataataacaataataatgaatacgaaattattgatttacatacttcatcttatccttcgaacagaaatagtaatcattctagatacccttacacaaataatccaaatcagctattacaaaacaccaattacaaagattggcttaatatgtgtcaacaaaatcaacaatatggtaaaaattttgaaataactcctactgcacttaaagatgctgttgttactgctataaatgtaaacggtgctatttttgtcgctattccaacaccagtgactgtggtaataggaacaggactaatattattaggctcattactttccttcctttggcctcctgaagaaacaggaggagaggctcaaccagtatggcaagaatttataagaaatattgaagaacacttaaaacgatccattgaccaacaagtaagaagctatgcaataaacactctaaaaggtatagacaataatataaaattatatagcaaatcttttagaacatggtttaatgatcaaaatgataaatctgctttagataatttaacaaaaaattttagtgaacttgataatctttttgaagcttcaatgcctcattttgcaagtgataaacatgaaatattattattaagcatatacgcacaagctgctaatttacatctacttttattaagggatatgttaatatatggtgaaaaatgggggtattga

SEQ ID NO: 50 - DNA, 2433 bp, Artificial sequence
  Synthetic polynucleotide or polypeptide
atgaatccatatcaaaaccagaatgaaataatagatgctccgcaaaattatgatactgttttcaatagatacccttacgcaaatgatcctaatatcgaattgatcaaaggcgaaggcattgccccttctagtatagggcttggagttttattaagtcttttttttgattacaaatccttacttagaagtccttctatatcaggtggaataggttttttacaaactattgtaggtctaataaggagtaatcacctagcaactgttactataaacgatgtacaacgacttattaatgaatcattagatacgtatacaaggcaacaggcagagactagaatggattccataacaaataattataatcaatatcttctgaatctacaagattatatacagggaagggcaaatcgaaatgactttgtacaaagtcttcgatctaatgaagcgagaatgcgaaatgaattagattctttttttagtcttcggggtcgagaattgttgttattaccaaattttgtgcaagttgcgttattacatttagcaatattaagagatgctgtggtatatcgaggacctgatttagaaagacctcttgctagtgaaacagctcaaacgccttttttaattcgacctcctagtagctcttttcaggaagcactttcaactagtatccgtatatattctaattattgtgcggaaatgtatcgtagtggtttaaatacaatgagaaacagaggtactacaggaagagcttggttgaactttaatgcatatcggagagaactgacattatcagtattagattttgtggcaattttcccactttttgatacgactctatatgctatatcgagaaatggttcgtttccaatatcttctcaattaagtcgggttatatatacagatccagcaggggcgattacggcagatggtagggaaggttggtttgctcctagacatcaaaacactgttactttttcaacgatagaaaatgatatgcctcttcctactacctctcgattcttacggtctatggatattttcgcacatggactaggtaatggtggagcacctaatagaacacagtcatggcaagggaatcgtaattataattggaataattcagtggataatttcggaaatactactggaagtccaagaagtatttctggtgacattttctttgtgcactcgctgaattatactatagatcttcgattatttggaatttatggggctgattttagacttgttaatggtacaacatctcaatatcgagtaccacaagggacaccatctggtcttggtactcatctaggaagcggtggacagtatttgccaggaagaaatacaactgtaccgaatgcaagtaattatacccatgtattaagtagagtagcgaatataactgtagggcttacaccaaatgtagcaggacaacgtaattcagtggtagtacatggttggacacatagagatttaactcgtgaaaatatatataacgtcgatacacattttcaaattccggcggtaaaaacaacaacacatacaccaggtgttcaggtagctgaggggcctggatctactgggggggatttaataagattgcgtcctaacgaagcagtatcttacgattttagacctaataacctaacaccatggggggtacaagtgcgtgttcgttatggtagtgtaggagcttctcaaataagagtagagtttactgacctatctggtgtatttaatccgcaaatacttcctttaccgcatacatttaccacaaatatcaatgagatgcgatatgaagatttcggtatggttactgctttttttgcacgtggtatgaatataatgcatggtaatattttaatacgcattactaatacaagtggaaatcataatttagtattagataaaattgaaatattaccaattcgttctaataatccgcttacacaacaagtaacaggattttttaatacactgtctggccaaggatattgtaatgattatgatcaaagctacaacaattacgaccaaagcatagagaatacgtatcaaccaagctatgacaattataatcaaaataatgccgatacgtatgattcaggatataataacagccagaacgctggctataattatgatcaagaatataataatcacgaccaaaatataggaaatacgtatgaccaatcgtataacaatgataatccagacaacaacaattacaaccagaattctgattgtacgtgtaatcaaggatataatagtaaatataaccaaaaatccagctgtacgtgtaatcaaggatataatagtaaatataaccaaaaatccagctgtacgtgtaatcaaggatataatagtaaatataaccaaaaatccagctgtacgtgtaaccaaggggataacaataactatccgaaataa

SEQ ID NO: 51 - DNA, 1098 bp, Artificial sequence
  Synthetic polynucleotide or polypeptide
atgaaacgttataaaaaaatgttaatggttgctccacttgcatgtatgttaggtacaggggttgttactttaccagatgcggcttatgcagcagaatcactgtcatcaccagtatctttcactaatgtatataatgatggggctgattatacgaaagaaaatttaacaaaagatctttacaaaaggatattgagggggattgaaaatacacctgaattacgtcagaaatttaaattagcagatgatgaaagtatacaacgagaaaatcctgctacgtcctttactgaccccaacggtaatactacagaatatcctgccacttattatggtttagaggatcaattgagtaaagtggaagtgggagttgttggatcacattttgaagttaatccgaccgtagatagttatgaagatttaggtcaaacgaatttattaacgattaataatgatgatggtactgtagcacaaacagctcaaacaccagaaacaacagagaaattctcagaaactatgagttattcaaattcaactggaatgaagctaggaattggaatatcaactacaattaaaattaagattccatttgatttaggagaagcttcgcagactgttaatatgaacagtgaatttagttttaataatacgcagacccaaactagtactcatgaaaaatccgttacatttaaatcacagccagtagttgctgctccaggtggcacaacgacttattatggtacaatcaagcgagcaaaattctctggaacattccagactgatgcgtatttaccaggcttaactttgaagcttcctatagtgaagaataatggaaatgatatagtgcatactgaagaagttactctaactccagaagatatgtatgctattttcaaaaatgggcttcctgtattaccaccttatttaagcttagatgatgagattaaaaaagtaaaagtgaataatgctagctttacgtttaacggagaaggtggttattattcaacagttcaagtgaaatttattccaaaggacccaaataaaaaagcacaagtaatgccatataaagagtatgtagcaaaaactcaagaaaaatctttataa

SEQ ID NO: 52 - DNA, 1002 bp, Artificial sequence
  Synthetic polynucleotide or polypeptide
atgatgaaatcatataaaaaaaaagctgtaatgattccattcgcatgtatgttaagtgtaggagtagtaaatatgcctactactacttttgcagactctacaaaaagtacaatattaaatgttaatacaaagagtgataatgtttataatgaaaataagtttatacaagatttaaaagatagaatgactccaggacaaagtatagctaatccaaatactgcgactaaatatgtatctaaacccgaatatcgtactgatgttaataatctagatataacagcacatttcgatagttggggacctacacaacaaatagaactattgtcgtacaaaaatgatggattagtagatcaaacatggaactctcctgaaaaaagtataaaaacaacagagtcttttacctattcaaaccaagaaggggctaaattgggagtatcttcaaaatcaacgttatcagttaaaattccttttgttgctgaaggcggtcaagagattacactttcatctgaatttaattatactcatacaagttctaacacatctactcatgaagaagaaattatatttaaatcacaacctgtaatttgtaaagctggttataccacaacatattttggtatagtgaaaaccgctaacttctcaggaacatttaaaacaaaatcaggagttcatgttcagacaatatcctactttgatcaagatggatacggatggattagtgaggaaaaacgtcctgatttttataataagggggttcattctttatttatggatggatcaaaaccaacaccatcatatttaaactttgaatcttatgtacaaccaaataatgaaaatatacaaataccagtagtagatattcaatctgaattcagcggtgaaggtggtcattattctgaggtatttgttaaagcaactccaattgattcaccaaataaatctattacactaccccttgaagaatatcaaaaaagagtagccaaaggattaccattagaataa

SEQ ID NO: 53 - DNA, 1761 bp, Artificial sequence
  Synthetic polynucleotide or polypeptide
atgccattagattattcgaaaatttttaagaaagttttacttgctaccactgctactaccctaagtgttggggtagtttcaggctgctcgctgttttcttcggaaaaaaagagcaccaaaacagcatcagtatctaaaaagaaaaaagatactgaaaaagaaaagaagaaagatgaaagtaaggatgaaacaactgagaatttaaatactaatgattttgatgaaatcattgataatgcaaaacgtagctcagatcaaaatttatctggaatcattgaaaataacaaaaccaaaaagaaatttgatgatttaacggattcaattgcgaccgcggctataaattcagatagaaatctagcatcagttattgacagtgataaatcaaataatcgtttttcagatttaaatacttcaatagcatcagcaacaaacaatccttctgtctcggataataaggacagtaagaactttgtatttggtggcaatctaaatatcaatgatggagttgctagtgcggataattcaatacccccaattaataatgataaaaagccaccagcttctggagactctagtggcggaggagatacaaaaccaccaacaggcggcgatggtaacgatggcggaggaggtacagaaccaccaacaggcggtgatggtaacgatggtggtacaacaaaaccagagaaacctgaaaaagatacagtggcaccagtaattacagcaaaaaaaggtgtgacagtaaatgtcggtgatggtctaagtgcagacgatttagtagaagtaaaagataataaagatccaaatccagtagtgacagtaggtgcgtatgatacaagtaaggcgggagaaattcaagtaacagtaacggcaacagatgcatcaggaaatagctcaagtacaacagtaaccgttaacgtagtagaaaaagaagaggaaaaagatgcagaagcaccaataatcacagcgaagcaaggtgtgacagtgcatgtaggagatagcttaaatgcaggagatttagtagaagtaagtgataataaagatccaaatccagtagtaacagtgggagattacgatacaagtaaggcgggagaaattcaagtaacagtaacggcaatagatgcatcaggaaatagctcaagtacaacagtaaccgtaaacgtagtagaaaaagaagaggaaaaagatacagaagcaccggtaattacagcaaaacaaagtgtagctgtacatgtaggagatagcttaaatgcaggagatttagtagaagtaaaagataataaagatccaaacccagtagtaacagtaggagcgtatgatacaagtaagccaggtacaatatcagttcaagtaacggcaactgataatgggggtaacagctcaactgcaacggtaaccgttaacgtagtagaaaaagaagaagagaaggatacggaagcaccagtaataacagcgaaacaaggtgtaaccgttcatgtgggagataaattaagtccgggaagtttagtgagtgtaaaagataataaagatccaaatccagtagtaacagtaggagcgtatgatacaagtaagccaggcgcaatatcagttcaagtaacggcaaccgataaggcaggaaatagctcaactgaaacagtaaatgtggtagttcttgagaaagaaaagccagaacaaaagccagaacagaaaactgcaggaacaacttctaaagagcagggtaatggattacttgtatcaaattctaatgatgtagttaaataa

SEQ ID NO: 54 - DNA, 645 bp, Artificial sequence
  Synthetic polynucleotide or polypeptide
atgtcaggatcaaatgcaaatgaagccagatatgtctttcagcatggcgatacttcttttccaataaaaattcctacaaaattacaaccaactaccctaggtcctattccagaactaaccagcataaatgatgctggtactcctcctccacctgcactcgtaggttctgcattgctcccgtgcatatttgtaaatgatagaacaccttcgcaaagaattcaggatagcccatattatattttagaatgttatgattattggaaattaataaagtccggtataattcaaccaggtggtagagcagattggtgggaagaaactggaattcgtgaggaagttcaagttaatatggagagaatgataaatataagcatcggcagtgataagagattacgattctttgatttatcaaatccttttcgccaaactattgctagggatataaatattctcacttctaattcagataaaaatttatcatacgttcttcgtcctgactaccatgataatcggttctggtgcaaaaaagctaaacggtttgaaaatgttctttcaaacttggccatactggtactactacttaaaaaggtgtgtgatcagtatgaaaaaagaaaatatattcaaatggaaacattatcagcctga

SEQ ID NO: 55 - DNA, 2193 bp, Artificial sequence
  Synthetic polynucleotide or polypeptide
atgaatccataccagaataaaaatgaatatgaaatattagatgctgtaccgggtaatatcaatacttcgaataggtatccttttgtaaataatccagatatttcaatgtttgataggatttccccttctagtataggacttggaactatattaagtctttttttggattacaaatctttacttggaagtccttctatatcaggaggaataggtttcttacaaagtattataggtctaataacaggtactaacttagcaactgttactatagatgatgtacaaagacttattaatcaatctttagatacgtatacgagacaacaggcagagagtagaatggactctataacgagtaattatgatcaataccttctaaatttaagtgattatataaatggaagaacgcatcgcgataactttgtaccaagtcttcgagctaatgagcagagactaagaaatgaattagattcattttttagtttgcgaggacgagaattgttgctattgccaaactttgtgcaagttgccttactacatttatcaatattaagagatgctgtggtatatggaggacctgatttagaaagaccgtttgttagtgaaacagctcaaacgccttttttaattcgacctcctagtagctcttttcgggaagcgcttttaactagtatccgtatatatactaattattgtacacgagagtatcataatggtttaaatcaaatgagaaacagaggtaattcaggtagagattggttaaactttaatgcatatagaagagaactaacattatcagctttagattttgtagcattgtttccattttttgatgagactagatatggtgtatcgagaaatggttctttcccagtaaatctccaattgagtagggttatatatacagacccagcgggttttcttaatgcaaatggtacggaaggctggtatgctcctagacataacaatactgttactttttcaagcatagaaaatgacatccctattcctactacctctcgattcttacaggctatagatattttcacaaatgggcttggtgttggcgcaaatcctaatagaacacaatcatggcaagggaatataaattctagtttaaataattcaagagataattttggatcaaataatgggcagccgagaattatttctggtcaaaacatttttagagtgaattcgacggttcatactttagatcttagatcatttggagtttctggagctgactttttgcatactaatggtcaaacatctcaatatcgagtacaattattccctccatctggtgttggtgttcatcatggaaccctttcgcggtttttaccaggaacaaatacaagtgtaccaactgagaataattttacccatatattaagtagagtagcaaatataactgcagggcttcaaccagtagtacagggacagcgtaattctgtggtaatacatggttggacacatagaagcttaactcgtgaagatgttcttgcacctgatactattacgcaaattcctgcggtcaaagcaagaagtatttctaattgtaatgtagtttcaggaccaggatttacaggtggtgacttagtcagaataaatgtaaatggacttttggttttccgaattactaggggaatagggatgccgagttatcgtattcgcttgcggtatgtttgttcaggaaattcagctttattagaggtaacatccggaggtgtacctcagacactaacacttcgttctacaactcataattcattaggaaattttgtatatgaagactttgactatgttgttgcaccattaacattaagtactggggtggttttagaaagagatcttgttattagaaatataggttcaaattctaatgtttttatagataaaattgaatatgtcccaggtagcatgtttctaaatccatcagtagaaaaaagtaaccaaaacatagagaatatatatcaaacaagctattacaatgataatcctaactccagtggtacgtatgaacatgaatataacccaaataccagtaatagtcattatcaaagttataacaataattacaatccaaattgtcgctgtaatgggaaccaagagtatgataattataatcaggactattacaacgattacaaacaaaactctggctgcacgtgtaaccaagggtataatagttag

SEQ ID NO: 56 - DNA, 2412 bp, Artificial sequence
  Synthetic polynucleotide or polypeptide
atgaatttacatgagaataaaaatctatatgaaacattggatgtttcatcttatcatgaatacacatcaaacagatacccttatgcaaagaatccaaacattatgaaaaactccaattataaagattggttcaatgagggacaggttgacacttctgctcatgtaagtacactaggcataatgttcggtctttttagacaatttacatctttctttagggcgccttccggatctggtaggataggaatactacgaaggattataaatacaatacaggatcgttcagtaataaatcttactataaatgatgtgcaacgacttattgatcaagcgttagaaaatgaaatcagaaaccaagcaaatcaaagatttactaatttacaatccaattataatcaatatcttgttaataaatcttactatataaattccccatctgatcgaagccgattccaatttgtgcatagccttgtcttaaatgaacgtgaatttagaaatgcattagatgttacttttagcttggcaaatcgggaggttttattgttacctagttttacgcagatcgcaatgttacatttaacactattacaagatgctgtgacatttggtggtccagacttaatagcgcctacgatgagtaaaacacctaggaattcttttttgaatcgacctcctagtaattcgtatcaagcggcacttttaactagcatacgtatgtattcaaattattgcgtaagacattataatcaaggtttaaatctcataagaaacagaggtaattctggtaatgtttggttgtatttccatagctttcgcagagaaatgacattaacagcattagatttcgtcgcattattctctctttttgatacaactaaatatccagcagcaagaaattctacaccacccgtagtttctcaattaagtagggtgatttatacggatcccgtaggtgctgtacaagtcaatagacgttatgggtggtttaatccacctgtaggaactgatagagttacgtttacaacaatagaaaatgaaataccggctcctactacttctcggcatttgtcggaattaacagtttcttcagggccgcttggttttggtgtaaatccgactaggacacattcatggcagggtaatcgaaatgttaatatatctgctcctactgatgtttctggagtaatctctaatcgggcgcaaactattcctgctagaaatattttcagggttaattcgcgtgtttatacccttgattggagattgtttggagtttatagagctgaattttttcagaatgctagtcaaaattctcaaaggcgtgtatttgcagaaagtcctccaggaggtattggtgcccaaagcacagataactttagatttttacctggagaaaattctgatacaccaactccacatgattatactcatgtattaagcagagtagtaaatgcaactgtaggacttacaccagcaacaggaaaccaacgtaattcagtattgatatttggttggacacataaaagtttgacccctgacaatatatatagaatcaacgaaattactcaagtagctgctgtgaacacaagaagtaattcgggtattcaggtaattacagaacctggatttacaggtggagatttagtaagaatgaatcctaacagtactgtaagttataattttacacctgctaatcaacaagcatttcaatcaaatgttgcaatacgtttacgttatgttagtcaagggacagcttcattaaggataacgtttggtaatggttctagccaagtaatatcacttgtttctacaacttcatcaataaataatattcaatatgaagggtttcgcttcattaatatcccaaataatgtaagttccctgtcagctggtaattcaatgactattcaaaatataagcacaaattctaacgtattgctagatagaattgaaattctttccaatatatcttttcccgatgaaccacctattattccagggaattatcaggttgtaacagcgttaaataatagtagtgtattagattttaatgcgaatactcagaatgtttcattatggtcgaatcatggagcgaataatcaaaggtggagtttcacatatgaccaacaaagaaatgcatatgtaatacgtagcttatttaattcaaatttagttttagcttggaatgtcccaaatgctaatagagctgtatttgttacaccatttcttccagggacaaatgcacaatattggatgatagaacgttttcaaggcagctatatacttagaaatagggaaaacccgaatatggttttggatgtagctggggggaacactaataatggtgcaaatattattgtatatccaagacacaatggaaatgcacaaagattttttattagacctgtttga

SEQ ID NO: 57 - DNA, 2427 bp, Artificial sequence
  Synthetic polynucleotide or polypeptide
atgaatttacatgagaataaaaatctatatgaaacattggatgtttcaccttatcatgaatacacatcaaacagatacccttacgcaaagaatccaaacattatgaaaaactccaattataaagattggttcaatgagggacaggttgacacttctgctcatgtaagtacactaggcataatgttcggtctctttagacaatttacatctttctttaggacgccttccgggtctggtaggataggaatactacgaaggattataaatacaatacaggatcgttcagtaataaatcttactataaatgatgtgcaacgacttattgatcaagcgttagaaaatgaaatcagaaatcaagcaaatcaaagatttactaatttacaatccaattataatcaatatcttgttaataaatattactatataaattccccatctgatcgaagccgattccaatttgtgcatagtcttgtcttaaatgaacgtgaatttagaaatgcattagatgttacttttagcttggcaaatcgggaggttttattgttacctagttttacgcagatcgcaatgttacatttaacactattacaagatgctgtaacatttggtggtccagacttaatagcgcctacgatgagtaaaacacctaggaattctttttctaggaattcttttttgaatcgacctcctagtaattcgtatcaagcggcacttttaactagtatacgtatgtattcaaattattgcgtaagacattataatcaaggtttaaatctcataagaaacaggggtaattctagtaatatttggttgtatttccatagctttcgcagagaaatgacattaacagtattagatttcgtcgcattattctctctttttgatacaactaaatatccagcagcaagaaattctacaccacccgtagtttctcaattaagtagggtgatttatacggatcccgtaggtgctgtacaagtcaatagacgttatgggtggtttaatccacctgtaggaactgatagagttacgtttacaacaatagaaaatgaaataccggctcctactacttctcggtatttgtcggaattaacagtttcttcagggccgcttggttttggggtaaatccgactaggacacattcatggcagggtaatcgaaatgttaatatatctgcccctactgatgtttctggagtaatctctaatcgggcgcaaactattcctgctagaaatattttcagggttaattcgcgtgtttatacccttgattggagattgtttggtgtttatagagctgaattttttcagaatgctagtcaaaattctcaaaggcgtgtatttgcagaaagtcctccaggaggtattggtgcccaaagcacagataactttagatttttacctggagaaaattctgatacaccaactccacatgattatactcatgtattaagcagagtagtaaatgcaactgtaggacttacaccagcaacaggaaaccaacgtaattcagtattgatatttggttggacacataaaagtttgacccctgacaatatatatagaatcaacgaaattactcaagtagctgctgtgaacacaagaagtaattcgggtattcaggtaattacagaacctggatttacaggtggagatttagtaagaatgaatcctaacagtactgtaagttataattttacacctgctaatcaacaagcatttcaatcaaatgttgcaatacgtttacgttatgttagtcaagggacagcttcattaaggataacgtttggtaatggttctagccaagtaatatcacttgtttctacaacttcatcaataaataatattcaatatgaagggtttcgcttcgttaatatcccaaataatgtaagttccctgtcagctgtcaattcaatgactattcaaaatataagcacaaattctaacgtattgctagatagaattgaaattctttccaatatatcttttcccgatgaaccacctattattccagggaattatcaggtggtaacagcgttaaataatagtagtgtattagattttaatgcgaatactcagaatgtttcattatggtcgaatcatggagcgaataatcaaaggtggagtttcacatatgaccaacaaagaaatgcatatgtaatacgtagcttatttaattcaaatttagttttagcttggaatgtcccaaatgctaatagagctgtatttgttacaccatttctttcagggacaaatgcacaatattggatgatagaacgttttcaaggcagctatatacttagaaatagggaaaacccgaatatggttttggatgtagctggggggaacactaataatggtgcaaatattattgtatatccaagacacaatggaaatgcacaaagattttttattagacctgtttga

SEQ ID NO: 58 - DNA, 2496 bp, Artificial sequence
  Synthetic polynucleotide or polypeptide
atggctcaattacgagaattacaaacacaatctattattccttataacattctagcaacccctccaatcggcaatgcagatacgcagcccgctagtttagatgacttaatcgaatcattaaaagaggcatggatagaattccaaaaaacggggagcgacgcacttttacagtcagttcttcagaatggattttctgcagccggtggaggaagttttaattatttagcagtattacaagccggaatcggaatattgggtacaatgctaggcgctgagattcctggagtggcagttgcggctccgattctaagcatggtgattggctggctatggccacataaaacccaagacgatacgcagcaactcattaatttaattgatgcagaaattcaaaaacagttaaataaagccctatctgagcaagataaaaataattggaccggctatttaaacgctatttttcaaatatccaatgatgcgtcacgttccgtggtagatgcacaatttacgggaaatgaaggagatgcaactagacaacctagaacaccaggagtttcagactacgaaaacgtttacaaccatcttctagcaactcaaggttctcttatcgttgccctgagtcaaatgattaacgggaactttgatacgctagctatacctttctttgtcataggagcaactgtacaactttcgacttatcaatcctttatacaatttgcgaataaatggctccctattgtgtatccagattatcaaacacaaggcactgctggatatacacaacaacaaaatttgatcaatgcaaaatcggatatgcgggcagcaattcaaaatcacacgcagaaagttttcaatgcctttaaagctgggcttccttcacttagctctgataaaaattcaattagtgtctataatcaatatgttcgcgggctagtattaaacggcttagatacagtcgcaacatggccttcgatgtatccagatgactatagaacacagacggaactagaacagacgcgcgttattttctcagatttaattggaaaagatcaaacgatcagtaatgatgtcactcttattaatatggcagacggaaaaaatggatcgggtgcatttaatcaacatgcaaccatagatctcaactccatcttttattaccatgaagaattgagtagcatacaactcgggatacatgacggtaatagaggtaataccactaactgttatgactatggaattattacgaattatccaaactattcttatttctatggagatctttacagcccctctggagacgctaccttctcagcgcctctaaatgtgttaaatgcgcaaactcaatatagcagtggatacgtagattcagagtttatttataatagtgatccatcggcctacggtttagggtgtcatatattgggaggatgtacaaaaggagactgttataatcagagttcgtgtagtgaaggttttggatacagttgtaatccttctcttcctagtcaaaagataaatgctttctatcctttcaaaatgaatcttagtaggagcggtacatcagataaattaggactgatgtatagccttgttcccttggacttaaacccaaataatacatttggggaattagattcaaatacagggaatgttattggaaaaggattccccgcagaaaaagggacacttgcatctggcaatgttcctacggtggtaagagaatgggtgaatggagcgaatgctgtaaaactatctgacgatgctttaactctcaaaatgacgaatatgacaggcggaaagtattatattcgcgtacgctatgctaatacttctaatgcagaaattagtatcaaccaaagtgtttctgcaggaaaccaaaatattcaaaatggaccctgggggttaccgagtacgataacaagtgtcgtaagtgatgcatcttttaaaaagttatatatagcagggcaaaccggaaattatgtgctagaggatataacgtggggggttgatgggcaaggaaaacctatcactattccttctggcgatgtcactgtaactctttcccggaccaacatgagccagtcgggagatctctttatcgatcgtgttgagttagttccgatgtcattacaaacgtacactgtaaactataccattacttcatcgcttccttcttgggacgattttaatcatgatgctaatgacataaattcttttccaaccgtatggaaagcagatgctaaccagtccgtgtccaaatttattgcatccgcacaggatttacctcaactacactcagttgtccctataggtctcagcaccaatggttcatggagtgaattaagagatgcaaatcttgatgatcttatatcctctggtactcagaatgtcgcttactctatgcaagatggaagttcatttacagagctaaaactgggctctagtgaatatcagatggctgcttcatcagggactattactggtacattgatataa

SEQ ID NO: 59 - DNA, 2355 bp, Artificial sequence
  Synthetic polynucleotide or polypeptide
atgaatcaaaattgcagtaatcatgaatacgaaatactggatagcaagagtatgtctcatcagtcaagatatccacttgcaaatgttccttattttgaacgacaaaatgtaaactataaagattggttaactatgtgttcagatagaagcacttttattcctgagagttatgtaagaactgcagtcattacaagtatgaaaatcttaactcagcttcttggattggcacttccaggagctggaggattggcaggacctctcggtgcattgcttgagtatctttggcctgcaaataatgaggctatatgggaatcttttatggcagcagtcgaaactctcgttgaacaaaagattgaaatttttgcaagaaatcaagcaattagccggttacgcggggttcatgataccatattgttatatcaaactgcacttgttaactggaaaaaaaatcctcaaaatgtaggcctacaagaggctgtccgaacgcaatttatagctacgaatacgttcatcgtcggctcgctgcccttgtttcaagtcggtggatatgaagtacctctgttaacgacgtttacggaagccgctaatctccatcttcttctcttagccgatgtgataaagtatgggagaggctgggggatggaggaagcctctataaatggctatcaaagtaatattgagactggtatattcagatacacagattattgtgtggatatatacaataaagggttagcaaaagctaagacgttaaaagcaaatgtaagagattatgatagatatccatgggcacgatttatacctgttctggataatcccgagaggtattaccaagatatggaaaattggaatttgtataatagttatcgaagagacatgactcttatggtgttagatgttgtttccacatggccaacatttgatccgaaacaatacccattggaagttaaagcgcagatcacacgagagatatatactgatttacgtggagaatcggcgggaagcatagacaatacggaagctcaaatagtcagaccaccacaccttttttcatttttaagatcatctaacatatatgcagatacttcttttggctatgaatatgaatatccgtatgctggtcttcaaatgtatgcacattatactttaggaccagatctcatataccctctaaaaggcaatactaagggcactctttatgaagttaatccatcagatgcagttatcaatcaagttatagttgatgtcgatcaaagtcgtaaagcacagcgaatgttgttttataaagaatataacacccaaccatttgtggctgtagactttcaacaaactctcaactatgtttctaccataaatcggattcctattgagggtgatcaaacgctggctaaccatagaatgtcatggcagagcggttatttacatccatcatcaggcaacggtcctagaaatatcacatgtcaaacttttggttggacacatattagtgcggatttagacaacaagattgtttcggataaaataactcaaattccggtggtaaaggggaatgcggcatataatgctgctgcggtagtgagtgggcctggttctacaggaggggatttagttcgattaagcccttctggcgtggtatcaatcaaagtaagaccatcacgccctggtataggttcgtatcgagttcgtattcgctatgcggctacagccaatggtaaacttaatgtcaaaaaatatgttcaaagtatacatgcagctgaaacttatgattataaacaaacatcttctggaaattttactttcacatcgtttcaatatttggaagtttatacctttgatcttgcagaatctgaatttgaggtatggctcaccaatgagagcggtggtcctatctatctcgacaaaatcgagttcattccgttaaacccaacaccagaaccaccagtgatttctggtatctaccaaatcgttacagctttaaataatagtagtgttgtagatatggatcctggaaataagaatgttcacttatggcaaaatggtaacgcgaataatcaaaaatggagattcgtatataattcaagtcaaggagcatatcaaattagaaatatagcggatgaaactttcgtattaacttggcagcggtcggaagggaacaatgtgagagcggtctctaatgcaaaccttccagagcagtactggattattcaagatgcgggaaatgggtatgtgaatgtaacaaataaggcagaccagaacaaagtattagacgtagcgggtacaagtactgcaaatggaacgaatattttagcatgggataataatggaggtacgaatcaaaaatttaaactactttaa

SEQ ID NO: 60 - DNA, 2061 bp, Artificial sequence
  Synthetic polynucleotide or polypeptide
atgaatcaaaataacaatacggagtatgaaataatggatacttcttcaaatcagccaaataaatatcttcgctatccaatagcaaatgaaccgaaagcttctatgcagaatacgaattataaagattggctgaatagatgtgagaaaaatccagttgcatttaataatgcatctgaacttcttaaagtcggcggatccatagtaggaagggcattggggttaattcccgaggtaggtagttttctggcttggttagtagcgttatattggccgacaattaatactacaccaaacaacgttacatgggaagaaatgatgaaatacaccgcagatctgatacagcaagaattgactcagtatacaataaatcaagcaacagctaaattaaagggattggcggaagatttgaatgtatataatcgcgctcttgaggcttggaaaacaaatccgaatagttttgccagtgctgagactgtacgaaattatatgcgaaaccttcattctacgttttcaagagaaattattagtaatttcaccttacatggttatgaaggtgtattattaccttcctatgcaagtgctgcaaatcttcacttgttgttattgcgagatatttcaatttacgggaaagcactaagttttttagaatcggatataaagttttatgctagcgaacaaaagttatacaccacaaagtatactgattattgtgtgaatacgtacaaaacaacaatgaattcattaaaatcaacttggtcaaaatataatcgaactcgtagagagctgactatatcggtattagacatcgtcgcgttattcccactttatgatacggaattctatcccactaaggatggtaagatacaagttaaatctgaattgactcgggaaatttattcagatgttataaacggggaagcgccaatggccaccgattattatagttttgagagaaatgaagcagaatatatacgatcaccgcatatatttacttggttacagggattaaaactacaaagcgattatattagggatggatctggtaatccttggggaaatgcatttattggtggtcaaaatatatattcttatactataattcctactacttttactacttcttggttgaatcagacaggtactactaagactgtatccctttcaaataatatttatatttatggtttaaatacaagaaactttaagtatatagctccagtctatccgacatatctgacgcaaattaatttttataaaacagataatagcgtgatcaatctcagcgcggggggaacaacagtgggccgagagatagttcaaaataattttgattatatgcttctaaataaagaaggaataggtcctgcgacatttaatgattacagtcatattttggcatctatgtgggggatagatcgtgctgtaaaagggtatatattttcgtttacccatagtagtgtggatcctgagaacagcattgcaacagataaaattacgcaaattcctgcagtaaaagcttctgcattaaataatggagccacagtaataaaggacccaggacataccggtggagatctagtaagtttatttgttaatcctgcacaacagtataatccgaatctcgctttgtacgtatcttataacacttaccaaactttaaatttaaaaatacgcatccgctatgcttctaatgcgaatgttatcttgactatgatagatacctttgaaaatacaaaggattcaccaattcagttaaaatcaacattttcaggtacacaggtagataagttatctaatgcggactttcaatatgtagaggctcccgttgtgaggcgcacaacagtaggatcacaacggactgtgttgatacaattgtttaatccccagcctagtgctcatgttttgatagacaaaattgaatttattccaattaccggttcagcgttggagtacaatggcgaacaaaatctgaagaaggcacagaaagctgtggacaatttgtttactgatgctgcgaaaaatgcgctacacaaaaaaacgccggattatgacatagattaa

SEQ ID NO: 61 - DNA, 1488 bp, Artificial sequence
  Synthetic polynucleotide or polypeptide
atggggaattgtgataatcaaacaagggacgttatcgttccaactgcacatagtaattacgttgatcgtaacggaatattaacaatggatagaagtggatttaatgttaatcgaacagttaattatacaaatagacattggatggggcgtattcctgattctcgtagaatcagtgaattatcaattccaggaacacatggatcaatggcacttcatggtggagttgctggaactataggagatatagctatcaatcaaacaatgaatcttgaaacacaattaaactcaggaattcgatatattgatattcgctgtaggcattatcataataattttgctatccatcatggacagatataccaacacgcattttttggttctggtgttttagaacccgtgataagctttttaaggcgaaatcccagtgaaacaattttaatgcgtatacaagaagaatacaatccaagagggaatacaagaacttttgctgaaacttttgaatccttctggactccaaatcaacgttatttttggactcctactggtactaatccaacattgggagaagtccgaggtagaattattctactacaacaatttccctctaatagaggatggtttggtattaactggggttcattagccatacaagatcaatttgaagtcccaggtcttaatggcatatacagtaaatgggtagctgttaaaaatcattttgttaacgcaatgaataatagaaatagaattcatcttaatcatttaagtggcactggtggtttcggtgcaccaagaccctggtttttagcaagtggctataggagccgaaataacaatagtcttttagatgttgcatcttctcgtcctgtactaagtggatggttagatttcccacgtgaccaccctacaataggagctgtatattggggaggaatgaatgtccttgcaactagaagaattagagaccgtaggtttactcatacaggaatagttgctgctgatttccctggaataggattaattgagggcacgattgcgttaaattttcctggaattattgcaggtaatcatcaaattgtaacagctttaaataatagtagtgtactagatttaaatcgtggggatcaagttacactatggtcgaataatcaaggaaatcatcaaagatggacatttgaatatatttttgaattgcaggcgtatcgaatagctagtgtaagcaatcccaatttagttcttactgtcgatacacctgttagagctgcttctagagtatacgcttcaccaaattatggtcagcgggggcaattttggattatggaaagaggtatttggggttataaattacgaagcttcggagatcctaatctcatgttaattgtagcagggccgactgctgctaatggagcaaatcttgtcgtatatcgggagcacgggggggggaatgaaatggttaatagatctcaagaatttacatttagacctatatga

SEQ ID NO: 62 - DNA, 2082 bp, Artificial sequence
  Synthetic polynucleotide or polypeptide
atgaacccctataacaacgaaagctatgaaattattgattcaaatacttcaccttatccttctaacagacataattcatattttaattctagatatccttatactactaaccctaatcaatgcatgcaacataccaactacaaagattggatgagtatacctcaaccttatgcagattgtcttaacaattcaattgattggcttcccggtgttagtgcagctgtcattgtagcgggtacacttttagcagcttttgccacacctatagcccccatagttctagctggatctttgattatatcaattgggacattactccctgttctttggccacaaggcgaatatgataataatgaaacatggcaaaaatttattgcacaaggaagtaaacttacgtgtcaagatctaacaccaggaattcaagtagccgtagatgcagctttaaataatttaaaaacgcaaactcaattttttaacaatgctgttatctattgggaaaatagtatgtgcacttcagatgaaataaacgctagagataatgcaaaagatatttataaaactgctgtacaaacaattgcaggtcttatgcctatattcaaatcaccaggttatgaagtattattattatctacttatgcacaagccgcaatattacaagttactttattacatcaaggaattcaatatgcttccgtatggaatttagctcgtgatactggagatttttatcgtaacgaactttataaagctatcgatacacatattgattattgtgaagcatggtatcaaataggtctagaacaacttaaaacgaaaaaagatttaccattcgctgcctatgtaaactaccgtagagaatatactatcaatgtattagatattattgctttaattccatcatttgatttacgtcaatatccaaactatcaaccaattaacatagagttaacgaggaatattttcacatttatacccaatgtaaatacgtctggtttatctgattttaaaggaatagaaaacattaacaacatagaaaaacaattaaatttcccaccagaattatttacacagttaaaaacaatccaatttttccaaaattattacccgccagaaactgaaaactatttatctggtgtaaataatatattgacttacgctaattttcctaaggaaatattaataaaatctggcgacttaaatcttccacaaacaccaaatccatcaataaccctttcaccagaacaaaatatttacaatattacaatagataatcataaagtttcaagcgtaccaagaacaggaattaactatatggaattaaaaatagctactcgaagaaatattagtaattctacatcttttcgttatcaaacatcttctaattatgacagaaatattttgccattcccaggggctatacaacagacaactttaacaaactatcaatacaaattatctcgtatcaaaatatctgaaaaaatgtaccctatgtctgacttcggtgtatatagatcttttttatatggatttatttggacaaatgctcactctaatcctactaatactattaacctgacaaataccgaggggaaaaagataattacacaaatatctgccataaaagcttatgaattacagggtggttcagttgtagaaggacctggtcataccggtgggaatttagttcaatttatcaaaaaaggtgattatattataatttcttgtttgtttagtactactggcagttataaactaagaatgcgctatgcatctaatactactaatcctactaatcctcaaaataaatcatatttactcataacaacaatagataattttaattctagttattctaatggagcactatctttaaaacacacaaccgatcaaataaattctacaaaacaaaaatataacaatttcagacatgatgttttttcatataataataatgaagaaatgatatttactataacacgaccagaaacaacattatatataactttaacttatgataaaaatagtaattcaaatcaaaatgaattcattttgatggataaactagaatttatcccacaataa

SEQ ID NO: 63 - DNA, 966 bp, Artificial sequence
  Synthetic polynucleotide or polypeptide
atgaagaaaaaaatgaagaagcctatggtagcattgatgttagccacctcgattggcataccttgtatatctggacctggtaatgcattagcagcagaaaatactccaactagtgttaatgaaaatgtaagagttggtattacagatgtccaatctgaattaaagaaaataggagaatatcattatactaataatattgcaggtacaaaaattgagtcatggcctacactgactttcaagcaaaaaccagatagtgttgacacaaaaattaacttcagtattacgggtaaagaaaataaattgaactttgatagttcaatcgttgaatacataggagaaaatgtatttcctaacccatttgatgaacctgtggagcgcacaacagctaaatattctaaggctgtaacagagtcaacaaccaccacgacagtacagggttttaaagtgggaggttcgggtgacggcagtaacatatttaccattccattactcttaaataacggtataaaagtaaatgcagaattcaactcttctacttcagaatcaaaaacaaaatccgagacaaaaacagtagaagcatctccacaaaaaataatagttccaccgcataaaacatataaagcagacgttatattggaacaaagaaattattggggtgatgttacgtttaccggtgtagggagcaatcctgtgacgacaataaagggaactgcatcatattgggctccaaatggtatgggtgcttggaaacaatacacttttagtgacaaaacagaaaattattggaaaggtctatctacttctcaaaaaaatagtgtaaacggaatcaaatttgaaaataataatgtaaaggcagaagggacagctagagtcgaaggtatatttggtagtctgttaactgtaaatgtttatgatattacagataaatcaaatcctaagttagtggaaacaagaagtttcaaataa

SEQ ID NO: 64 - DNA, 1014 bp, Artificial sequence
  Synthetic polynucleotide or polypeptide
atgagaaagtataaaaaattagcggttgcaatgccacttgctggtatgataatgagtggtgtgggggttttaggaggacctgcttcttcatttgcagatacaatgcctcaagctaaagttgcgccaatgtatacgaatctagttgcagctgatcattatcaacagttcatggatatgctaaactcaaaggaaatgggaggagaagctgataattttgaaatagtagctatgccagatagtgggcctaaaaatatccatataactgaagcaaaaccaataaatgcaccagaaaatactacagaagttatgagttatcataatgtatcgggtattcagcaatcattaaaaacaccttcaaaaaaaataacacataaaaatacacttgcaataaaaaatggtggtagtattaaaacatctattgaatctaaaactaaattttcagtacaagtacctttctttgcaaaaggggaagaagaacttaaagtaggtctagacgttacttacaatagagagagtacggatacagcagaaaatacgcaagaatttacagttccagaacaaactttacttgctcaaccaggtggtacaacaagattaatatatactgtacaatctactgcattctcaggtacgtataacacaaaagctatatttaaacaaaaacaaggtggaaaggcgaaaaaaattataaacggaaaagaaatagaaggaaaagaacttgaaaattggaatgaagaacaaggttattactttattaaagggcttttagaagacaaacctgaatttggatataaagcacctgaatttggagatatttttgtgtttgatgatgtgaataaaaaagtatatttaaaagatggagtatttacatttgaaggtcaagctggacatcaatcaacagcagaagctgtatttattcctgatgacaatacaaaaccagaagtgaaaatgccacttgctgaatacaacagaagagtagcggctggaatcctcgtctttttgtatttgaagtga

SEQ ID NO: 65 - DNA, 987 bp, Artificial sequence
  Synthetic polynucleotide or polypeptide
atgagaaaatataaaaaattagcggttgcaatgccactagctggtatgataatgagtggcgtgggagttttaggaggacctgcttctacatttgcagatacaatgcctcaagctaaggttgcaccacatgttacgaattttgctgctgctgatcattatcaacagttcatggattttatgagcagcaagggaatggaaagatacgctaataattttgaaatagtagctatgccagatagtgggcctaaaaatattcgtataactgaagcaaaaccaataaatgcaccagaaaatactacacaagttatgagttatcataattcaacgggcgttcaacaatcattaaaaacaccatcaaaaaaaataacgcataaaaatacaattgcaataaaaaatggtggtagtattaaaacaactattgaatctaaaactacatttggagtacaagtacctttctttgcaaaaggagagcaagaacttaaagtaggtctagaggttacttacaatagagagagtacggatacagcagaaaatatacaagaatttacagttccagaacaaactttacttgctcaaccaggtggtacaacaagattaatatatactgtaaaatctactgcattctcaggtacgtatactaacaaagcaatatttaaacagaaacaagatgggatatcgaaaaaatttgaaaatggaaaagaaatagaaggaaaagagcttgaaagctggaatgaaacacaaggttatcgattcattaagcaaattatagcgtcacaacctcaacttgcagatatttttgaaatggatgatgcaaatgaaaaagcatatttaaaagaggcagtatttacatttgaaggtcaagctggacatcaatcgacagcagaagctgtattcatccctgatgataacaaaaaatcagaagtgaaaatgccaattgctgaatacaataaaagagtagcaaacggtatatctctttatgcaaaataa

SEQ ID NO: 66 - DNA, 939 bp, Artificial sequence
  Synthetic polynucleotide or polypeptide
atgaatatgaagaagaaaaaacaatttttatctttagctatgcttgcaactatgggtacatcactggtcattacatatcccaattcagtaagtgcagatcaaattaatcctattaaaagtactactcaaacgcaacaaaatccatctatttctgattggagtgcacctattcaacaaatatataaggctcataaacaaaattcaccgaatactcatatatctaaggaagcaagaattagcaatttcaatattatccaatcatcagtagaggcagatggtcctacctttacaaataaaaaaaccatgtatatagggcgagcaatattaaataacccttcaaatagagagcgaacactttctacagcggaattttcaaagactatcgaaaattccgttactaattctactactaatgggtttaacctgggagtaagtacttctgcatcatttggtatcccacttattggacaaactagtgttgaactatctactgaatataacttttcgaatacagcagcaaaaacaaaaactgaaagttacacatatactgctcctaagcaagaaattgttgtacctgcatattcaagtgtagaagttattgtacaattagatatggttaaggtaagtggaaatgtaaaacttctttcccacgtggacggttcagtttcctggcaatatgataaaaacaaaccgtataatttgagaggttttccgcttaaatttttcgtgcgagatagcggtaccaatgttcctagcaatataaaagctcatccacagaagggtgcatatttaatagggaccgggaactactcagctgaatatggaacagagttcactgtaactgtaaaggatactagcccaattcgcccaggttctattcgctctactaatgacgaatatacttataaagtaaaacctcaagtgaaaaaagtaaagtaa

SEQ ID NO: 67 - DNA, 2070 bp, Artificial sequence
  Synthetic polynucleotide or polypeptide
atgagaataggaggaatacttatgaatcaaaataataatcatgagtatgaaattatagatacgaatccttcactttatccacctaattattctaaatatcctttcgcaaataatccaaatcagccattgcaacatacaaattataaagatttatgtaatgaaaaatctaactatccattaagttgtatatcaacaccagtagattggacagcagctgcaagtgcaataataattgtagcagggactataataggtggtatagcttcaggaggattagctgcacctataggtgcagctattatatcagttggtacactaattcctgtttattggcctaaaaacaaacctcctaaccaagtttggtcagatcttatagcacaggggaacaagctaagtcctacagaaatattacaaccaacaatacagctcataatgtcaacagtacaagaattagaaagacatcttgatacttatcaattctttctagaaaggtggaaacttgatcaaaataaccaatcccttaaagatgagttattacggcagatttcaactattagttcattttgctatgcatctatggcaagattttcaatatcaggttatgaagtaatattgttacctgcttatgcatcagttgccgctcatcatattgtttttttacacgaagttcttcaatatgcagaaaaatggggaatagctaaaaacgttggagactcatatcgtgcattcttaagtaaaatcataaaggaatatattaattattgcgaaaaatggtatcgtacaggtttagaacaacttagaaacacccaaaacataacatgggaatcgttcaataattatcgtagagaatacactataagtgtattaaatctaatttcaacattccaaagattcgatccaaatttttatcctgataatatggcaactcaaatggaattcacacaaaaactttatacaacaacaccagaagtatactcagtgcaaacaactcaaggaattaatattatagaaaaagaacttatacctcctccagctttatttacccaattagctaaaatacaattttatacatttacggctgtagcaatgtatagatatttagaaggcattactactactagataccgtactaattcttatcttgacccacaaacatcttcttctggaaaaacaacaggttctgaaactagcttaaatttagaaattgttaatactgctgaagctatttattacagtgacatatttcatcacatagataatacatcgaccttagaagctactcatggcattcgcaatattaattttaatgttataaataaatataatcaagtcaggcatttaacatatgattctacaggaaccaatacttatataacagaatcaatattgcccttcataaatacaacatctccaataactgagaaaaattacaagtatattttgtctgatataaaaatgttttcaagagacatacctggatgttactacggtacaagtaaattatactcatttatttggacacacagtaatgtaaatcttcaaaatacaattaattctacaacagaagttataacaccagacaatcaaagaaaaatagttccacacattacgcagatttctgcagtaaaagctgcaagtaaaactctcgacactttagttagagaaggacctggtcatacaggcggtaatttgattgaatttaaaaatccattggatttaatagctatagcttgtcgatttactgataatgctcagtatatagtacgtattcgttatgcttctgaatacctatcaatcgctgcaaaattaagaatcactaatctagaagcagacaacaaacaaactgaattaaatataactttgacaactacaccagaaacagtacttaatcaaaatactgtaaataatccggaataccaaaattttcgttataatacggaggcgattataaatatcaagaaaccaacaaatctgccatatttaccagtacagatcgatttagtaattggaggagatctatcaggcaacaagataactcttattgataaaatagaatttataccaatttaa

SEQ ID NO: 68 - DNA, 2169 bp, Artificial sequence
  Synthetic polynucleotide or polypeptide
atgaattcttataaaaataaccatacaatggttaattcccccgaaaattctagcaatactgtaaataggtatccttacgcttgtaatccaaatattgaaacgcaaaatatgaattataaagattggatggctggatatgaagaaattgctccatcttcattatctttaattttatcttcaataggcattcttaatcaagtaattgccttaactggcgtattaggtaagacaccagaaattattaacatagtacaagaaatggtgagtttaattagagggaacacaggcaatgatttattagtacatgtagaacaacttattcaacaaacattggcaacacagtataggagcgctgcaactggagccatatatggtatatctagagcatacaataattatttggagttctttaggcaatgggaacgtaatagaactcctcaaaatgggcaacaagtcgagagtgcttttactactgttaatactttatgtattaatgctttagctcctcaggcgtcactttcacgcagaggattcgaaactcttttattacccaactatgctctagcggcaaatttccatttgttattattaagagatgctgttctttatagaacccagtggttagctaattctatttcaacaacaaatgtaaatatccagatattaacaagggcaataaatgaatatcgtaatcattgtaattattggtataataacggattaaatagatttacacgcacctcttttaatgattgggttcgattcaatgcttatcgtagagatatgacgttgtcggtattagattttgttacagtatttccaacgtatgatcctattcgatatccaagaccaacaaatgttgagttgactagaattgtttataccgatccaataagtccacctagaggatttcctagaaccaatcctccttcctttaatcagatggaaaatttaattatttcgggtggtcctagtttcttgaatcaattgagaatatatacaactttttatcatgatcctcatcatgtaaatagagactattgggccgggaatcggaattatttaagcaatgggatttctcgacagtctggatctaccacaccttggccaactaatatacctatgcaaaatattgatattttcagagtgaatctaactacccatgatattgactctatacaacgaagttatggcggagttcatagatctgatttcattggtgtaaatacaataaataatcaaagaacaacattgttctatcaccaaaatgtggatacttctcgttttctaacaaggaatgaaacagtatttttaccaggggattcaggattagaaccaaatgaacagaattatactcacaggttatttcaagtcatgaccacatatcgtattaacccgaatgctcgtagggcagcttttttacatgcatggacgcatagaagtttaagacgtagaaatggatttaggacggatcagattatgcaaataccagctgttaagaccataagcactggtgatgatcgtgctgtagtgttaaattatggagaaaacatcatgaaattagataatttaacttcaggtttatcctataaagtaacggcgacagattcagcagcgtccaatacacgttttattgtgcgtgttcgttatgctagtatggacaataataaattgaatcttgttttaaatggcgctcagatagcatcactaaatgtggaacgcacagtgcaaaatggcggcgaatcattaacagctcttcaatgtgaagattttaaatatgctacatttgcaggtgatttccaaatgggttctcaatctatattcggtatttttaaagacatatctaatgcagactttattttagataaaattgaattaatcccatcccatttcatgtcatcattagagcaaacacaagatgattacagctataatcaaaatactatttatacatgtaatcaaggatatggtacttacgaccataattctagtaatatgtatgatcatcaaaactacaaaaattatactcaagacatggatactacataccaaccagactatgataattataatcaaaataataccgatatgtatgattcaggttataataacagtcagaatactgggtgtacgtgtaatcaaggctataacaataactatccgaaataa

SEQ ID NO: 69 - DNA, 966 bp, Artificial sequence
  Synthetic polynucleotide or polypeptide
atgcgaacttttgtgacatcgaatagtctgataataaatacatatcaagggagtgtttgtaaaatgcaaaaaaaagtcatattgtgtggtctattagctggtactttgctaggtaatgttactctttctactaatgtaagtgctgctgaaatcgaatggaataaaaataacattataaataatcaaactagcaaaattcaaaaagcgatgaaagatattaatcaagaagcaatacaagatattgatcaaaaagttgataagatgattgattccatcccaccaatttttggttccaaatatacacgtacagatcgctacggtgaaagtcttacttattcaggaataaatctaaaagagaacaatagtaccaacattgaacctatgttctttggaacaaatacattttataatgatacagagctagagcaatcatataacactatttcttttagtgaagctgttactaaatcaactactactcaaacacaaaatggatttaaatcaggtgtaactacaggaggaaaggttgggataccttttgtagctgaaggtgaagtaaaaatcaatcttgaatataattttacacacacaaattcaaatactactagcaagactacaactttaacggctcctccacaagctgttaaggttcctgcaggtaaagtttataaagccgacgtttattttgaaaagaaatccacttcaggtacggtggaactttatggcgatcttcttacaggtgtagtagccgagggaaggacaacatttataggtaacgtattacataaggcgaccgataaacaagggttaattcaatcacctaatgatccaaataaagttcgtgcagttggaaaaggaacttttaatgttgaacatggttcaaactttatagtaaaaacatatgatgtaacatcgggtcaaaaatccgcaaaattggtagatactaaaatagttcctataaagtaa

SEQ ID NO: 70 - DNA, 1077 bp, Artificial sequence
  Synthetic polynucleotide or polypeptide
atgaaattgaaaaaatataaaaaaatattactagttgctcccattgcatgtatgttaagtggcggagttttgtcgttaccaactgtaaatgttgtacatgcgcaagaaattcagaaacccggagtaatgaaacctgaagatgcgtgggatgaaggggatcattatacgaaagaacatttagcaaaccttgcacaaattagatttttctatgctgcagacaatatccctagtttacgagagaaattcaaattaaaaccaggtgaacattttgattttaactctagccagaatgttgagtatctaaaaaaagcctttcgtgaaaacttgcaattatctgctgaaggtccaattaatgttacaccacatatagatagttatactgacctagaacaaactaatttaatgtcgattaacaatgatgatggaattgtagaacaaaagacttctacaccagaaactactattacagaatcagaaacatcttcttattccaatacagaaggaattaaattgggggcagaggtggaatctaaagtaaccttcaccataccatttacggcatctggagaaacaaaggtaacagcaaaatctgaattttcttatgaacatggtgatactcaaactaagacccatgaaaaaggggtaacgtttaaatcgcaagaagtagttgctgctcctggaggaacaactacttattatggttcaatcaaaacagctaacttttctgggtcattccaaagtaatgctgtagtaggtggtggtataaccttaaccctccctattataaaggatggtaaacagactcatacggaaacagctactttaactgcagaagatatgtatgatcttttaacagcaccaatgcctttcaaaatggataaaataccggcatatctaaaatttgatcatgctggtaaaagggcattactaacagaaaaagcaaccttcgatataaagggacaaggtggtttttatacagaagttatggtgaaatttattccaaaagacaaaaataaaaaaatgaaaattatgtcatacacagagtatagacaaaaggtaaaacagaatgctctttaa

SEQ ID NO: 71 - DNA, 2892 bp, Artificial sequence
  Synthetic polynucleotide or polypeptide
atgagtaataccttagtaccttataacgttttgagaagtatagatatgccgaacatatcaggaaccaagtgggataaaggaatgtttatcaatgcccttgataatacttcttttcttttagagcttatagaaaaaggaattaatgatggtgatgatgtgttaggtctgttaagttttattggattaacggccttagaagcaattccaattgtgggtggagttatgtccaaacttgtttctatgttatttttccctacaaaatcaagcattaatttccagaagatatgggagcaattagaaaaagctattgagcaaatagttgacaaaaagataacagaagctatgatgtctcagctaatgcaagaaatagccggtttagccaatgtgttagaagaatataggaatgcttatgatttatataatggtaaaaaattatttaatataccagataagatgacacctggggaatatctgaacaatgtatttactactgcaaatttgcaattcattcagagaataccgacatttcagaaccctaaatatgatgtagtgtttcttccattctttgttcacgctgctgaaatgcatattcttctcgttagggatgcagcaatacatggtcaagaatgggggatggatgaaactgtacaccaaaaatttaaaagggatttaaaaactttaattaataaatattctagttatttattagctacatataaaaaaggattaaaagaagcatccgaaaaaaaacttgaaaataatgattttccaacaactaataaccaacatcattatattaatacagtcagatggaatgtgatcaatcaatataaaagagggatgactttaactgtctttgattttgcttacaaatggaagtattaccaagaagtttatcaaaacaatataacgttaaatccagttcgaacaatttattcagatattgcaggttcagtatatccttatgaaaaaactacacatgaaattgataatattatcaaggatcagaaccttaaatatcgtggaatcttaaaagaaatgctaatttatcatgcacatagaatcgatagtgttcaaagtaagtatataaggaacaatgaaataattgataataaaaaaactggggggactggtggaagggcatccttttacgattttaaatatccaataaataaccctttaatacaagtagatatgaggtatgaattagtaccattttctttaggattcaaattatataatggagaaaagccaaaatctatatcgggtgctggactccctggaaaacacaaggctggctcttatcattatgtaggaaataaagtgtcttctattataggatttggtaaaaatgaaaccggtggattcaactcactagatgcaatggtagttggttttaaacgagacgattatatacctgaaaatagttttgttggtataaaccaaaatggtaaacctgtaactaaagtagtagatgcagagaatttctacaaagagaagtttcaatccaatataataatgattgatgaacctatgtttggagatggggttttacaattcgaaaattattctaataatcttaataaggatagttatgtaacatatcaaattgatgcaaagatagagggtacttacaaattacatgcaattataggtgcaaaaaaacaaaaagataaaatagcttttaaaatggctcttaatgaaaaacagccagaaaattttataactgaaccctttaatgacggtgatatttgggaaggaatatcattgagcgaaggccttgtttataagagaatattattaggaaatttccaacttaagaggggtatgaatcgtattactattcacaatggagtccttcaagcgtcagcaaatataaaaacatggaatttagctaaactagagttaacactcacttctgatagcttaaaagaccctgatattacaaccttatatgataacgataattatacaggaacaaaaaagcttatttttgggaatacaagtcgtttaaaagactttaatgataaaacatcatcaataaaagttgagtctcatttagccggcattagactttatcaagattactattataaagggaagtctattgaccttgtaggtggagaaaaactaagtttaaagaatcatttatttaataacaaggcgtcttcaattaaatttgctaatatcgttttatataaccaagaaaactataagggttcaagaaaactagtttttgaagatattcctgatttagaaaaacacggctttaacgataaaacctcttcaattgttgttagttctaatgtatctggtgctagactttatgaacatactaattataaaggaaattatgtgaatgtcgtaggtggacagaaacttaatttaaaaaaccatgggttagataaaaaaatttcatccattaaattttttaaagagggtgaagtacataatggtgtatatcaaattattactgcactaaataacacgagtgtattagataaacacctacaaaaaactgatgttcatttatgggggaatgcagaaaacaaaaatcaaaaatggcgaattgagtatgatgggactaaacaagcttatcaaattaagaatatgttggatgagaagttagtattatcagagaataagttatctccatttctctcagaagtacattgttatcctaacgaaggttatgattggcaatactggatttttgttcatgtaggaaatggttattatattattaaaaataaaagggattatgatcaggtattagatgtaaagtatgcgaaatctgatgatggtactgcaattcaactacaaccacagcatgagttaactgatccacttattaatgcgcaaaaatttaaacttaaggatataaataattaa

SEQ ID NO: 72 - DNA, 3714 bp, Artificial sequence
  Synthetic polynucleotide or polypeptide
atgggaggattgttgatgaatcaaaattataataataatgaatatgaaatcatggataatggtgttcagtgctgtacaccaagatatcctcttgcgcaggcaccaggttctgaactacaaagtatgaattatcaagatgtgacggaaacgagtatcggaagagaataccaggcagtacaacaggtaaatgtgggagaggctgttagtgccgcactgggcattctgacaactattcttaaggcagccaatccaatattggggacagccgcaggggtcatcagctcgattttcggatttctctggaaacgatttggaacagatcctcaatcccaatggaaacagttcatggaggcagtagaatatctggtgagtcaaaaaattacagacgcagtacgaagtaaagccgtttcggaattagagggtgtacaacgagctgtggaactttatcaggaagctgctaatgcttggaacatgaatccggatgatgcagctgccaaagagaggataagaagacaatatacctctacaaatacagtgattgaattcgcaatgccatcctttcgagtgggtggttttgaggtaccgttattaacggtgtatgcgcaagctgctaaccttcatttactactattgcgagatgcggttaagtttggagcgggatgggggttttctcctacagaagttgaggataattatactagactccaagcacgtacagcagaatatacaaatcattgtacaaatacctatgataaaggtttaaagcaagcttacgacttagcaccgaatccaacagattacaataagtacccctatctaaatccatattctaaagatccgatttacggtaaatattatacagctccagttgattggaatctatttaatgacttccgaagagatatgactctgatggtgctagacattgtggcagtttggccaacctataatccaagactatataacaatccgaatggtgtgcaaatacagctttcaagagaagtttatagcacggtatatggaagagcttggtctaataattcaacagttgatgtcattgaatctacccttgttagacctccgcatttagttacggaactaaccaagcttacatttgatgagcgtaatttatatgaagcggaaacagtgcctgttgcgtttagaagggttacaaatacgcttcataatgtaggaagttcaaccacatgggagcaaagttttactgcgacttctgttggatcaattaaggctgttcataatgtcgcggctaccgatataggtaatcttgcactaagtctaggagctgtacctttgggtttttctttctataataaaaatgatcaacatctaactacagtgggctactctggaggttggtggaatgggatacctaaagacgaaggtagtaatcaaaacagtcatcatctgtcatatgttgcagccctagaaacgcagagtacagctggttggtggccttatacgtatccggtgcctttattaggagaatggggatttgggtggttgcataatagtttaacaccaaccaatactatagtaagtgataaaatcactcaaattccagcggtgaaggctttcaaactcacaccatacaatagcaataccaaagttattaagggtcctggtagtacaggaggggatctaatccagttagcttctggctttttacaatatagtttcccttcaaccgacaatcgacaataccgtattagaattcgttatgcaagtacgaatggtagtactctaacactcaaaaaatgggttggtaatttctataccagctctaatcataatcttccatctacgtattctagtggcccattaacatataatacatttgccatttttgatactggacacattattcgagagacaagtggattcgaactttggttagataatataggtagcggaaccctaatcatcgacaaaatcgaattcataccgattgaggggtctttagaagcgtatcaagcggaacaagatatagaaaaagcacggaaggctgtgaatgccttgtttacgaatgatgcaaaaaacgctttgaaattgaatgttacggattatgctgtagatcaagctgccaatctagtggagtgtgtatcagatgagatgcatccaaaagaaaaaatgatcctactggatcaagtcaaattcgcgaaacgcttgagtcaaacacggaacctcctaaactatggggattttgagtcggatgattggtctggagcgaatggatggaaaacgagtaatcatgtacatgttgcggcggataatccgatctttaaaggacgctacctccacatgccaggtgcaacaagttctcagctttctagcaatgtgtatccaacctatgcgtatcaaaaagtggatgaatcgaaattaaaatcctatacgcgttacctcgtacgaggatttattggaaatagtaaagatctagaattgctggtagaacgatacggaaaagacgtatacgtcgagatggatgttccaaatgacatccagtacgctttaccgatgaatgaatgtggcggatttgatcgatgcggacatgtatcctatcaagcagcatcccatcacacatgcacatgtaagaatacagctcaaatggataccgattgtcagtgtaaagacaaagtgaatcgtaccgcaccaggcgtatataccaacacagttccgggcagtgccatgtatacaaatggataccattcacacaaatcatgtggatgcaaagatccacatgtattttcgtaccatattgatacaggatgtgtggaccaggaagaaaatcttggtttgtggttcgccttaaaaattgcgagcgaaaatggtgtcgcgaaaattgacaacctagaaatcattgaagcacaaccgttaacaggggaagcgttggctcgcgtgaaaaaacgggaacataaatggaaacaagaaatggcacaaaaacgcttacacacagaaaaagccgtacaagcagcgcgagatgcgattcagcgcctgttcacaagtccaaagctaaatcgtctgaaatttgaaacgctcctacaacagattctaaacgcagatgcattggtacaaaaaatttcatatgtgtaccactctttcttgatcggagcgatgccaactgtaccaggaatgaacaatgaaatctaccaaaaactatcggcagctattgcgcaagcacgtgctttatatgaacagcgtaatctggtgcgaaatggtacattcagttctgggacaggaagctggcatgtgtcagatggcgtagaggtgcagccacttcaaaatacatttgtactcgtcctatcggaatggagtgatgaagcgtctcaggaccgacgtatcgatccagaacgtggatatgtgttacgtgtaacggctcgaaaagaaggcgcaggaaaaggcactgtaacgataagtgattgtgcggattatacagaaaaactcacatttacatcttgcgattacaacacagtcggttctcaaacgatgacaagcggtacgctatcgggctttgtgaccaaatcgttagaaatcttcccagacacagatcgaatccgtatcgacatcggtgaaacagaaggaacctttaagattgaaagtgtggaactcatttgtatggagcaaatggaagaccatatgtatgatatggcaggtaatgtagaagcaagcataccgccactcgtgccacctatgaattag

SEQ ID NO: 73 - DNA, 3372 bp, Artificial sequence
  Synthetic polynucleotide or polypeptide
atgaacctaaatggtaacaagaatgaatttgaaatcctagatactggtaacatggcctatcagccaaggtaccctcttacccagtcaccagcttctgaattgcaagggatgaatataaataagtgtgaagatcaggagttaggtgaattatttgtagattcaaatgctgtgagaaatgccgttgttataggagcaaagattacagcaacaatcgtaggtatagcttttccacctttaaaaataccagcacagatcctaagtacgttgattccagtcttatggccaaaagaggcaggccctcctggaactgctgaagcgcaatttacatgggagcaaatgatgagtgctgtggaagaaatgattgatcaaaaagttgagattgcagtaaaagaccgtgctattgaaaccttacaaatcttacaatcacgtataagagattatcaacaagcactttgtaatttacaaacagatcctgataatgagagatttaaagaggacgtaagaagggaatttaatgatgccgaagatcaggcgaaagccgctgtcatccaatttggaaacccgaattatgcgattccattactacctgattatgcacaagcagctaatatacacttacttttattacgagatgtcgtacaatacggagaaatctggggattttcgttcgttgaagttcaacaatattactttaataaccaaataggaaaccccggcatgaaacaactattagcaacctatacggatcattgtgtacgttggtataataatggtttaacaaatagatacgaaacgggcggctggaatacattcaatgatttccgtagaaatatgaccctaatggtaatggatgttgtgtcattctggccaacctatgatcccatgctctataagatacccacaaaatcacaacttacccggattgtatatacccccttaattggaagggcagacgactttccaggtattccagcaccaactattggtgagaaagaaagtacactcactcagcccccacgtttatttgcatggttacgtgagttatctattggcgagacaactttcccatattatttctctacaggcttctgtggtcgcaaacaaatttttcagaacactatggataacaatttatgggaggaaccatacaaagggtctcctggagtcaacgacacacagactcttattattccggcaccggaagttaacgatgatgtatggcgtatcgtcacttacttaaaaatgactacggggagcatacagtacgacgagatcatgggatgggatttttcttttactaaatcattagatcaacgcttatacagataccatcttcgttcggtatcgtcaggaatgccttgcggtggttcttttccgggtccttgcgacccttgtaattctgtagatccttgtagctttgaacttccgaaccctacgatcccttgtgatgacaaagcactttatagtcatcgatttgcttatatgggtgccggttttgtttccaatctagcagcaatgacatattttagctacggatggacacacgtaagtgcagatgcaaacaatctgatagatgctgagaggatcacccaaattccagcggtgaagggatccgaaatggagggcactgcaaaagtaatccaaggtcctggtagcacaggaggagatttagtacagttagattacagaggaagaatacaaatttctatgacagcgccagtccgaaaaggatatcaattacgaattcgttatgcaactgcctccacagcagagatacatgtaagcagagtatccattagagaagatgattcttcaaatgaagactattatcacttcgaatttttaccgcaaacatatttggctggatcgttaaatttcaactcctttggttatactacgatgtctattccactacctcctggtgctggtgaacaatgggatatgtcattccagtggttcggtacagattcaccaatcatcatcgataaaatcgaattcattccaatagaaggatctgtggaagaatttgaagcgaatcaagctgtagaaaaagcacggaaggcagtgaacgccttgtttacgaatgatgcaaagaatgccttacaactgaatgtcacagattatgcagtggatcaagctgccaatcttgtggagtgtgtatcagaggaattccatgcacaagaaaaaatgatccttctggatcaagtcaagtttgcgaaacgtctgagtcaatcgcgaaatctattaaactacggagattttgaatcgtcagattggtcgggagagaatggatggagaaccagttctcatgtccatgttgcggcggataacccgatctttaaaggacgatatcttcacatgccaggtgcaatgagcccgcaattctctaacaatatctatccaacgtatgcctatcaaaaagtggatgagtcaaaattaaaatcctatacacgttacctggtacgtggattcgtcgggaatagtaaagacctagaattattggtagaacgatacggaaaagaagtacatgtggaaatggatgtacaaaatgatatccagtatacgttaccaatgaatgaatgtggtggctttgatcgatgcaaaccagcatcctatcaagaaagacttcctcatacatgcacatgtaaaaatgccgctgtagcgcatacagattgtcagtgtaaagataaggtgaatcgtacttcggcagacgtttataccaacggattgacaagtcggggcatgtatgcagatggattcccttcgcacaagtcgtgtggatgcaagaaccagaacagtgacatgtatcagaacggaacacattcgcataagtcttgtggatgcaaagacccacatgtcttcacgtaccatattgacacaggatgtgtgaatccagaagaaaacgtaggtctattctttgctttaaaaattgcgagcgaaaatggtatcgcaaacattgataacttagaaatcattgaagcacagccactcacaggggaagcgttagctcgtgtgaaaaaacgagaacagaaatggaaacacgaaatggcgcaaaaacgcttgcaaacagagaaagtcgtacaagcagcaaaaggtgcgattgagaatctgttcacaaacgcgcaacaaacccaactaaaacacgaaaccttgtttcctgagattctaaacgcagggaaattggtccaagacattccctatgtgcatcacccattcttgagcggggcactgccaaccgtaccgggcatgaatttcgataggttccaacaactttccttcttgattgagacagcaaggggattatatgagcaacgaaaccttgtctcaaacggaacgtttggtgctggaatcgcaaactggaatgcgacatga

SEQ ID NO: 74 - DNA, 2529 bp, Artificial sequence
  Synthetic polynucleotide or polypeptide
atgaatcagaattacaataacaatgaatatgaaatcaaagatgttggcgtcatggactatcagccaaggtatcctcttgcgcaggcacctagtgccgaattgcaacaaatgagttataaggattggatggataggtgtgaacgaggatcgctggcaatcacatttaaatccgttattacaaccgctttagatattacgtctgcaatcctcggtgcggcaaaatctccaaaagctaaagtagcaagagctgcggttcaagtccttaataccgttattaaattgctgtggcctgaaccagaaaaaccttctgaaccagcatacgatatagatttcatatggaaagaactgataaagagagtcgagatactgattgaagaaaaaattgatcgagaagcttataacgccgcaattggaagattatcaggattaaagagagctttaaatttatatcaaatagcgttttgggattggctcaaagatgaaaatgaccctgagttacaggcagagttacgaactcggtttacggctgcactgtttgaacttgtgactacaattgaaacatttaaatacaatggacaagagttaaatttgctgacaatttttgtacaagctgcagattttcacttaatgttattacaacaagggataatgtatggagttcggtggggattcgatcagaggacggtagattctctttaccaaaatgacagtggagaaggtttgaaaaatttgctaccgaagtattctgattatgccacctattggtatggccaaggtttgaatagagcaaaaaacttgaaggcaaatttatcagatacagtaagatatccttgggccgcaaacttagaagatacgagtgtattacaagagttagaggattggaacctatataacgattatcgaagagacatgacaatcttagtattagacttggttgctgtatggccaacatatgacctccattattacgataatggaaactatggggtacagtctgaactcacacgatctatatactctcaagcagtaggaaatgtaatgggaactgtatttacaaaagagcaatacgaggttagcttcgttcgcccaccacacttagttacatggttagaaaaaatgtttgttcatataagagacaaggaacagggcgcacctaacgatgcagaaatggctggtataagtctagattattcttattcaggttgggataatacggtttatgacatacttcaaggatatccagcgactgggggtagtcaaattcgtgtgcttgcaaaaagtaacgtgattgttcaagatcaagagaaaaatcgagcgatttacaatacagacctccaacatgataaattagtagatcgatttgttttttatcaaaatagtggagaagttaactatgctggtagagataatccgtcaagctataaaacatttgcatgggatactgatgttaccaactataatagtcaaatgacatggataaatggaccagtaaatgaaggccattttggttatattcaggcttatgcgccggaatggattcctgcaagttgtgaaccgtttaatactatcgtggatgcagaagatgtaattactcaaataccggcagtgaaagctcgagaattaaaatatggtgcacgtgttataaagggtctgggctatacaggtggagatctagtgtctattgcacccaatggtttgtgtgagttgtacgtgtcatttccaaatgtagcccgaagatatcaggttcgagtacattatgcatgtcaggattcgaccaaaataaaactacgtataggggattcaagtcatgatattaaacttcaatctacgtattctggaggggcattaacatacgattcatttggttatgcaacaagtgaatacagttatctattttatcctgatttttatgatgagaaacagatagtacgtttgggaaatgattttgatataacacagcaagatatcatcattgataagattgaatttattcctgttgatatcttctatgcagaggaacaagctttaaaacaagcaagaaaggccgtgaatgccttgtttacaggtgatgcgaaagatgtcctgaaattgaatgtgacggattatgcagtcgatcaagctgccaatcttgtcgaatgtgtatcggatgaattccatgctcaagaaaaaatgatcctactggatcaagtgaaattcgccaaacgtctgagtcaagcaagaaatctattacactatggagattttgaatcgctagactggtctggagaaaatggatggagaacaagtcatcatgtttctgtcagatcggataacccaatctttaaaggacgatatctccatatgccaggtgcgacaagttcccagttttctaacaatgtctatccaacgtatgtgtatcaaaaagtggatgagtcaaaattaaaatcctatacccgttacctggtacgcgggtttgtcggcaatagtaaggacctagaattactggtggaaggagaagtctgtccaaaggcagatatatcttatcaatga

SEQ ID NO: 75 - DNA, 2148 bp, Artificial sequence
  Synthetic polynucleotide or polypeptide
atgaatcaaaataatcaaaatgaaattcaaataatagcttcttcatccaatgattttaatcgatcaaataggtatccaagatacccattagctaaagagtcaaattataaagattggctagctaattgtgaggaatccaatgtagaaccattgttaacagaagaagaactaaggaatgcactcttcacaagtattagtgttacgacctggcttttgaattatctgggtcttggacctatcgggacaggtgttaatgtactaggcagaatattgggttttttatggccaaatcctaacgagttgaattgggtgaatcttatacgtactgttgaagcccttatcgctcgagaaataacagaatttgcaatagaagctgccacgaaaaaattggaaggcttgcgatcaattatgtcgatatataatacagcatttaacgattggaacgcaaatgaagcaagtcgtaataatgacaaacttcaagagcgggtaagaataacttttgctgatgtggattctgctttagcaggggctatgcctcaatttaggcagaacaattatcaacaacagctgctacttgtatatgcacaagctgcaaatatgcatctacttgcattgagggatgctgttattcatggggaagcatggaaattggattcaaagacagtgaacgggctttatgatagacaggtatgtctgattgatgcatatacagaacattgtatgtccttttatagacagggtttgcaggatttaaggaacagaggaaactggaataatttcaataattatcgtaaaaacatgactattgctttattagacatcatttctttattttcaaattatgatggccgtttgtattcgataaatacaccaatgcaacttacaagagaagtatatacagagcctaatgctactcctcagtggttaaactataattttaatgcgagccaatttaaccaaatagaaaatgatcttattcgacaaccttcattgtttactttgttcaatggatcgacactggatgcctcaaccttatttcgtgtagatttttcaggtgtacctgtacctggtattactagatttaatattaaaagtcaaactagtttcccaaatccaagtcagtctacaagtccttggttcggtttgcctaccagtactccggatcgatcctttaacttggagggtatacctgaggacgtttttagaatccgttcaacagccactactcataattatggaagtcaatttggcaattggagaactgggattactcgaatggtttcctatttaacagcaggacttagaactagaacactagactttaatctagacactagttatggtattcgtactatagaatcttatttaccgggaacaaattcaagttcagaatacccaactactgatacttatacccacaaattatcttggatttcggcttctcgcgtaggatttctacaggggtttgtcacagcatatggatggacgcatattagcgcaacgctaattaatagacttctaccagatagaattacacaattcccagctgtaaaatcacgggtattctctggttcgacaggtactcgtgtaattagtggccctggtcatactggaggagcacttctagctatgagtggatatgctgctttggcgatttcttttgactctccctctctatctaagcaaaaataccgtttacgtatacgttttgtgaaggactttaatgatgttacgttaagagcgttcattccaggtattttttctcggagttttactttgccaggtagtggagccgcagtcgatccgaatttatcggtccgtgattttcgctatgtagatgttccaggtgattttgagttgatgggtaatttcagtatttatgatcttactatagattctccaaatgcaaatgtaacaggtacctgtttaattgacaaaatcgaatttattccttgtgatacacccaatttagaatgtgatagacaacaaaatctagaaaaagtaaagaaagcggtagacaatttgtttaccaataatggaaaagatgctttaaaggttgctacaactgattatgtatcaaatgaaattatagatcaccaaccggattatcgtttcattcaagaaagaaatgactcaagttgttattaa

SEQ ID NO: 76 - DNA, 1992 bp, Artificial sequence
  Synthetic polynucleotide or polypeptide
atgaattcatatcaaaataaaaatgaatatgaaatattggatgcttcactaaataatacaaataagccaaacagatacccttttgcaaaggatccaaatatatttcctattaacctgaacacttgtcagggaagctcatggcaagatacgtgggaatcagtctcggatatattaactattggggtataccttatactattcttgcaacaacctagtataggtggaattcctgtaatattgtcaataataaacaaactaattccatcttctggtcaatctgtggcagaactttctatatgtgaattattatctataattcgtaaagaggtagacgagagtattttaaataacagggtttcagattttaacggtaaattggctacttatagaacgtattatcttgattctcttcagaagtggcttgatgcaaaaaaaccaacggatccggaaaatcagctacttaagaatgtagttagagatttcatagatgcggacaaaggtttcattgaacttatagaagggggattatcacaaaataaagctcaaatattattattgcctacttatgcacaagctgcaactgtgcatttattactattaagggatgcagttcaatatatagaagaatggggatcattgttgggaacggagaaagtaggatcggaattaatatcacctactatggattataagaagcgattaaaagaggcaatagaagattataccaatcattgtgtatattggtatcaggcggggttaaatcagataaaagaggcgggtacaagtactgaaaattggttgaaatttaataaatttcgtagagaaatgacgttggcggtattggatattattgctatatttccaacttatgattttgagaaatatccattaaaaacaaatgtagagttaactagggaaatttatacagatccagtgggatattcaggaagcactattggctggatacaaagttttaacaatggtttcaatgcgctagaagcttatggaacacggggacctggtttagttacttggcttgaagttttaggtatatataatcatgattttcaggatgctacggtttattttagcggctgggtaggaagtcgtcattatgaagactacacacggggtaacggtactttttcacgtatatctggaactacgagtaatgatatacgcaatcagactttttactctcgcgatgtatttaaaattgattcattaggtatctttgacacgtcagggtcacctggaggtaaccctgcaaactatcggttttgtgtttcacgtgcagtatttagttcaacactatataactacgtgtatgatgcacctagtaatgggctaggccgaatgacaattgaatctatgttaccaggtattgagaatccaatacctagttctcaagattactctcatagattatcaaatgcagcatgtgttggatttggtggtgcctccaaagttaacgtatatggttggacacacaaaagtatgtcaaaagataatctagtttatccagataaaattacacaaataccggcggtaaaagcttttgctttagaatcaggcgcttatgttagcgctggacctggtcatacaggaggagatgtagtaacgttaccaaatagaggccgtttaaaaatacgtttaaaccctgcatccacgagtaaaaattatcgtgtgagaattcgctattcagcctgggcatatggtgctgtattagtagaaagatggtcgcagagtggtgttgtaaataatgtttttcctgttccatatacgtcgggatcaacctttggatatgtgaacactttggttactacatttaatcaatcaggggttgaaataattatagaaaatcgacataatagcgatattatcattgacaaaattgaatttctcccggatgatttaacaactttagaatctgaaggagaacggaatttagaaaaaacaaagaacacggtgaacgatttatttatcaattaa

SEQ ID NO: 77 - DNA, 1728 bp, Artificial sequence
  Synthetic polynucleotide or polypeptide
atggtattgcggtttaacaaatacgcgaaaaaggttgtgagtcctatgtttacaaggggtgcaaaaaatacgttgaaaatagaaacgacagattatgaaatagatcaagcggccatttctatagaatgtatgtcagatgaacaaaatccacaggaaaaaatgatgttatgggatgaagtaaaacgggcaaaacaacttagtcagtctcgaaatttactccaaaatggagactttggagatttttctgggaatgattggacattcggtaatgatattatcataggattcaataattctatttttaaaggaaactttcttcagatgcgtggagcacgagacatatatggaaatatatttccaacctatatctatcaaaaaatagatgaatccaaattaaaaccctatacacgttatcgagtaagagggtttgtgggaagtagtaaagatttaaaattaatggtaacacgttacggaaaagaaattgacgccattatggatgttccagatgatttggcctatatacagcctagctcttcatgtggagattatcgctgtgaatcatcgtcccagtatgtgagccaaggatatcctacaccatatgcagattggtatgcttctgatatgtactcaaaccagtccaatcaaggtaaaaaacatgtaaagtgtcacgatcgtcacccatttgattttcatattgatacaggagaattagatacaaacacaaacttaggtatttgtatcttatttaaaatttccaatccagatggatatgctatattaggaaatctagaagtaattgaagaaggatcactaacaggcgaagcattaacgcatgcgaaacaaaaggaaaagaaatggaatcaacacatggagaaaaagcgaatggaaacacaacacgcctatgatccggcaaaacaagcagtagatgcattattcacaaacgcacaaggagaagcgttacactatcatactactttagattatattcagaacgccaatcagttggtacagtcgattccttatgtacaccatgcttggttaccggatgctccaggtatgaactatgatgcatatcaagggttaaacgcacgtatcatgcaggcgtaccatttatatgatgcacgaaatgttataacaaatggtgactttacacagggattaaccggatggcacgcaacaggaaaggcaacggtacaacaaataaatggagcttctgtattagttctatcaaattggagtgcgggggtatctcaaaacttgcatgcccaagagcatcatggatatgtgttacgtgtgattgccaaaaaagaaggtcctggaaaagggtatgtaaccatgatggattgtaatggacatcaggaaacactgaagttcacttcttgtgaagagggatgtatgacaaaaacagtagaagtattcccggaaagcgatcgtgtacgaatagagattggagaaaccgagggtacgttttatatagatagcatcgagttgctttgtatgaaaggctatactagcaatcacaaccaaaatacaggtactatgtatgagcaaagttataatcagaatacgggcgatgtgtatcatcaagggtatacaaacaactataaccaagactctagtagtatgtataatcaaaattatactaacaatgatgacctgcattccggttgcacatgtaaccaagggcataaatctggctgtacatgtaatcaaggatataaccgttaa

SEQ ID NO: 78 - DNA, 960 bp, Artificial sequence
  Synthetic polynucleotide or polypeptide
atgaaactaaaagtacttgcaacaacaggattagcattatcaattggatttgctagtttaggagtattagaaaaacctacttttgcagatgaaaccaaagaaaatattgttgtaccacaatcaaattctataaagggatatttgtataaagatggtattcaaacgcctgtatacgaatcatcaaaagctaaatctattggtggagtagaatttcctgaattaccatccaatccattagctggtgttccgagagaaggaaaagcagtaaaacatactgggaaaatagggaatattatttatttggaaggaacatccgaatttctcctaaatgggaaaaaatcaaaatattatttagaaaaaagatctgatggtaaagttggaatgggatattatgatcccgatacacttgagttacgtccacttccacaaacgtgggttgacatgaaatataagtttcctacaactgatatttttgattttacaagattaaaaagagaaacaaaatacgaattaattgtatctgacatcatggataatgcagcaacttataattttggtaagagtataacacatggtttgtctaaaaccggtacagtgggattagcagcaaccattggtgctaaaattagtacagaggtaggcggtggaattattcctgctaaggtggcaactgaaattagtgcgtctttaacgacaagtttttcatatggtattaccgttacaagtgaagagacaatatctcgtaattttagtgtagaaaaagtaaataatccatcgtaccaatataggcagtatgcagtaggtgtgtatcaattaaattcaacatatagtcctgaaattggtgctcgtttacaaacgtttattaaccataatccagaacttaaaggtctttcaaataaaatatataaatacaaggacgagcaaatgtactttggtgtgacaccaggctctcatatataa

SEQ ID NO: 79 - DNA, 978 bp, Artificial sequence
  Synthetic polynucleotide or polypeptide
atgaaactaaaagttctttcaacagttggactagcactgtctttaggattaactagtttaggttctggcggcacagcttttgcagcagaaacaaatatgatttcacctcaaacaaatgcaatcaaaggttacatgtatgaaaaagggattcaaacgcctgtatatgaatcctctcaaagtagatcttttggcgctgtagaatttcctactatgccatctaatccattagctggcgtgccaaaagaaggaaaatcagtcgcaaacattggttctattggaaatattatatatttcgaggggaatggcgggaaacttcctaatgggaaaattggaaagtactatttagaaaagcaatctgatcataaaatagtattgggattatatgatcctgagacattagaattatattcattacttcaaaatgttgtgcctgcaaccaaaaatagtggcgatgaaatcgttccagcctataattttagtaaagtatttgatggtacaacaaagttaaaacgagaaacaaaatatgaattaattggatcagacattatggataatgcggtaggttacgcttttaacaaaagtgtatctcatggtgtatccacaactggtacagtaggattagccgcaactgttggtgctaaagtttctacagaagtcggaggaggaattatacctggtaaggttactgctgaaattagtgcttcactaacgacaagtttccaattcggtattactgtctctaatcaatcgacaatctcacataactttagtgtagaaaaagtaaacaatccatcttatccatataataaatatgcaacagctgcatatcaattaaaatcaacatacagtgttatagaaggtgacggtttaaaacaaattctaaaagagaatccagaccttaagggcgtttcaaataaagtgtataaatatgatgaacaacagctttacttcggtgttacaccaggatcgcatctataa

SEQ ID NO: 80 - DNA, 987 bp, Artificial sequence
  Synthetic polynucleotide or polypeptide
atgaaaaatagtaaaaaattaaagagaaaaatattagcttgtggagcaatcgcatctattggaaccacatttgtaacgtcatcaccaattttagctagtgcagatcaaattaacatttcagaattagaaagagatacgaaggttgatacagctatattggaatggaaagtacctctatttaaggcaacagaaatttatgggaaaaatatagttgttccaagtggatatgtatatgataaaacttggtcggacgggtatgttacttcgtataaaaatttagaatatcatcaattttcagtagaatcagatggttcgcctattattactaattcaaacaatatatttgttggaaagaccaccctaactaataatacaaaccaagaacaaacgttatctactaatagtttttcaaaaatgatttcaaattcagttactcattcaactacacatggttttaaatttggaactaaagcttccgcaaaatttaaaattccttttgtgggagaaacatcaatagaattatcagcagaatacaatttttcggatacatctagtgaaacaaactctgaaagctttacttatattgctactccacagaatattaaagttcctgcccattcatctgtagaagttgttgtaaatctagatacagttaaagcaaaaggggatgtaaaacttcttgctaaaatgtcaggtgaggatactggtagttttagttataaatctacaacaggaggtattggtaaagcatatgtttataataagacatttaattcattagttgcatatgcttcgagatttgaaaaacttcaaaatatctcagccaatccagatggtaaaacagtaaatattataggttcaggtaaatatgaggctgaatatggaactgagtttaatgtaactgtaacacctattgataaaaatggaaagtcggttgatgaggggtatacatataaggtgaaaccggagattacaaaagaaaaataa

SEQ ID NO: 81 - DNA, 1719 bp, Artificial sequence
  Synthetic polynucleotide or polypeptide
atgctgttaccaaatgaacgtcatttagtattgagtaaaaaaacaaacgccaatcggctgggatttgctgtcttactaaaatattttcaaaaggaagcttgttttccaagcgaaaaacaagctatctcgaaagatattgttcaacatttagcacatcaaatagatgcgttacctgaagatttttttgaacattatagatggggcggaaaagaaagaagttatacagatcatcgaaaaatcattcgtgatctctttggtttcagagagatcacttcaaaagataatctccaattgatacaatggctaaaagaacaagtacaacgtgcaaactataatactccgaatgctgcgtcaaatttagtgcaagcatttgcgattacatctgatccacaatttccttggacagataatacagatgctcgtagaccagaagatgatggtaccaaaaaacggcgttcagaagaattaattcgtgcacaatatactagtattaacgagtatatgaatagtttgtcttctactgtgaatggaaatgtaattattaatggagatatgacagcttttggacatgggaatgaatggaataaaataaatagtttaatacatacattgaatagaccttattattatggattagggaatcatgatattgaaaataattttaatgattgtgtcaataacggatgttttaaaaattctttaagagaattaataaaacatgtccaagggcataatataccagtatctcaatttgattatagtagatctccgtctggttccatttatacacatcgaggtagttttggatatgttgtaaattttgggaatgtatgttttatacaattacaacatgaccctagaatgaatgcaacagctcctggaacattttggggagatagagatacctatgttattgctccaaatataaattggttaaaaaatcaattaagtatggcagaaggtagtggaaaaattattattgtgaatgttcatgtaaaagaaaatatttctggtgattatacacgattattacaaaactatggtgtaaaagcagttttttctggtcattttcatacttctttaggaacgaatggttctgttggaactataccggcatttatatctggtagtgcatcacaaagtacgtatttaatcttagaacagtatacagatcgattagaaatttatactgttcgtaataataattggagagctagacacttggtgcatacaatacctatatctacgcaagtaccgattgtttccggtcgttatcaaattgtaacagctttaaataatagtagtgttgtaaatatggaaccacacgattgtaataatttcaatatttgcaatgttaatttatggcaaagtgctaatgtttcgcaacaattgtgggattttagatatgattcatctaaacaagcatatcagatatctactcccgcaagaaattttaataatgctttggcttggaatgctccaaatcctgctactgacagaaatgtagtggttgctccatttgttccaaattatgatgaacattattggattttagaacgttttcaaactggatttgtatttaaaaataaaaacaatcctaatttagtgttagatgtagcgaatcatagaactcaaaatggtacaaatattgaggtctataataggcatccttctaatacttcttatagaaatcaaacattttttttacgatctgtttaa

SEQ ID NO: 82 - protein, 830 aa, Artificial sequence
  Synthetic polynucleotide or polypeptide
MNSLQTLQAQPIIPYNVLANPLSGNADAQPGSLGDLIASLKEAWVEFQKTGSDKLLQSVLQNGFSAASGGSFNYLAVLQAVIGVLSTVLGAEIPGVAVAAPILSMVIGWIWPSKKKDETQQLINLIDAEIQKQLNQALSNQDKNDWTGYLNAIFQISHDAARAVVDAQFTGSEGDTNRQPRTPGVSDYENVYNHLLATTGSLIVALSQMINGNFDTLAIPFFVIGATVQLSTYQTFIQFANKWLPIVYPDYQTQGTAGYTQQQNLINAKSDMRAAIHDHTQKVFNAFKTGMPSLGSDKNSVNAYNRYVRGMVLNGLDMLATWPSMYPDDYPSQTELEQTRVIFSDLVGKDQTVNNAVTLINMVDKSGPDAWNQHSSIDINSISYTRRELQQVQFPIHDGNRGNTTNCYPYAVILNYPDNSYFYGDLYAPQFSGNPTFGGDNDILTALNARTQHTRYVDSESLQMNCYPYASNDCHILGYCTGGTCLAPSGCSDGYGKSCNETLPDQKINALYPFRMDLGHSGTPDKLGVMSSHVPFNLIPNNVFGAIDSDTNNIIGKGFPAEKGYWSNGGDRPIPSSNIAKEWVNGANAVKVEYGAFLAMKATNMKTGKYYIRVRYANPSNKDVNMWQEVWAGNQKLQGGGWTFKSTSDDNVADNFPKQVYVTGQQGDPLNLPSGEIMVKLSGQNSGDSIYVDRIEFIPISETENINYMITSTVPLLPSGQYVPSLSNYPTIWTADSGQQAISATLTFSGLNSTLFLLAKTNPGDDNDENNWDWMCPDGFLGSVLNGTYTFPINNHDSACAKKPFTAIKIGAELIPVSAGTITGSITHQR

SEQ ID NO: 83 - protein, 1318 aa, Artificial sequence
  Synthetic polynucleotide or polypeptide
MNQNDNNNNYEIMDTGGRGYQPKYPLAQAPGSEWQNMNYKDWVNQCAGGESGELFVDSNALRDGVITSTAILSVVLSVTFPVASAVTGIISVLLPLLWPEQAGTPGTSEAQFTWKQLMGAVEELVDQRIETLVKDRAIESLKSLQQRMRAYQQALCNLKTDPTNARYKEDVRTEFHSSETRARDAIIQFNNTTYAIPLLGNYVEAANLHLLLLRDVVQYGESWGFTALEVQQYYSNTAAGNPGMLQLLATYTDYCVQWYNTGLQQQYNTGVWDKFNNFRRDMTIMVLDIVSLWPTYNPRLYVVPTKSQLTRQVYTPLIEKSDIGGPNPISRLENILAPASLFSWLREIEFYMTDPVHQERFLGYKMKLQPTFGTLYEKIFNGTYQHRTSTVLIPEDEVVYKMSNWTLQNFNFYFTPTGAVHTVGDTSSANQDRGLACLTDVNCADPCTTNCQVGTVNTSIPCDSPSLYSHRLSWIGGIFSVGANWTHLTRAIYGWTHVSADANNLIDPYKITQIPAVKASSISSEVSVIKGPGSTGGDLVQLAPSGELQLKVTLPGVDPNIVAAYLVRIRYASSQSSSLTMYYDAGYEEGSRVFEMPATYSGGDLTYNTFEYQNTFSITAQSNRQLVEIIFNHSGPNVGPNIIIDKIEFIPIQESVETYEADQALGKARKAVNALFTNDAKNALKLHVTDYLVDQAARLVECMSDEIYPQEKMCLLDLVKVAKRLSQARNLLNHGDFESPDWSGENGWKTSNHVSVTSGNQIFKGRYLHMPGAGNSQFSDTVFPTYVYQKIDESKLKPYTRYMVRGFVGNSKDLELLVTRYDKEVHKNMNVPHDITPTNPCIGASQLGEGPMLTNHTIPQNMSCDPCDAGTVMKVQQTLVKCEDPHAFTFHIDTGELDTDRNLGIWVGFKVGTTDGMAALDNLEVIEVNPLTGEALARVKKREHKWKQKWMEKRTKIETAVQTARGAIQALFTDSNQNRLKSDITLNHIIQAENLAQRIPYVYNAFLQGALPPVPGETYDIFQQLSSTVAIARALYEQRNVLKNGDFIAELSNWRGAKGAIVQKIGNASVLVISDWSANISQDVCVNPEHGYTLRVTAKKEGSGEGYVKISDGTNDNTETLKFTAGEEATRLMQSDMRSPIQERYNERNMTNAPSEAYGTNGYASNSMTNYLSDNDGANAYPGNTNRNYQSESFGITPYGNENPMTDYPSNKYEMHASPGSTNMTNNGVGCSCGCGTNAYTGNNPNGSDYGCGCRTYINNRTDSYTSPMTAQNGSSLSGYVTKTVEIFPEMNRVCIEIGETSGTFKVESIELIRMDCE

SEQ ID NO: 84 - protein, 799 aa, Artificial sequence
  Synthetic polynucleotide or polypeptide
MNQNYNNNEYEILDNGVQCCPPRYPLAQAPGSELQSMNYQDVMNTSVGREYQAVQQVNVGEAVSAALGILTTILKAVNPTLGTAAGVLNSIFGFLWKRFGTDPQAQWKQFMDAVEYLVNQKITDAVRSKAVSELEGVQRALELYQEAADAWNVNPNNADAKERIRRQYTSTNTVIEYAMPSFRVAGFEVPLLTVYAQAANLHLLLLRDAVKFGAGWGLPSAEVEDNYTRLQARTAEYTNHCTNTYDKGLKQAYDLAPNPTDYNKYPYLNPYSKDPIYGKYYTAPVDWNLFNDFRRDMTLMVLDIVAVWPTYNPRLYNNPYGVQIQLSREVYSTVFGRGWSNNSTVDAIESTLVRPPHLVTELTKLTFDERNLYEAETVPLAFRRVTNTLHHVGTSTTWEESFSAPSGFLKNVHNVSANDIGNLSLTLGAVPLGFSFYNKNNQHLTTVGYSGGWWNGIPKAEGSNQNSHHLSYVAALETQSTAGWWPYTYPVPLLGEWGFGWLHNSLTPTNTIESDKITQIPAVKAFQLSNNASVVRGPGSTGGDLVQLSATSSGNRQLWIKVKPTTIALRRRFRVRIRYAAAATATFTVQKCVTGVACWETATKSVTTTYSGTLTYNAFKYVDIFEIPANEPEFSLEFLGTSGGPIYIDKIEFIPVNPTEEVPPPVLSGTYLIGTAVNPTEALTPDAATRNVVLSGIRYTYGQYWELVYNSSESAYQIKSPAYNSVLTCNGYGGSNNVFIAPDRQLSEQYWMIEDAGNEYVYFRNYSRRSEVLEVSGSSTIISGYNGGTNQKFKFLKIQ

SEQ ID NO: 85 - protein, 1239 aa, Artificial sequence
  Synthetic polynucleotide or polypeptide
MAYQNESEGEILYTIPSKAPLANGAQRSPLTNSSRTELQNMNYKDFLNQCESPVIGEIAPSMNTSSAIRTATLKSIEVISSMLSSLPIPGAPILGYAGKFFGAILGLLWPDGQEDVWKAFMEAVEELVDQKIEEFAKKLAISSLEGIFNVAAEYDNALGRLEKDPNNAALKEEVRVKYYDTIAAIVQGMPYFKTQSYEVPFLTVFTEAANLHLLMLRDGAMFGAQWGMDPTTVKNYRNNFNVLLGEYTDYCVKWYNIGLDRASKLKADINDRDKYPWIGPGHIALSPDKWQYTEDWNLYNDYRRNMTLQVLDMVAVWSSLDDQYYPMPTKVQLTRDIYTNVWGIGTDSNGSWAQVEARFTRPPHLVTQLLNLGYYTKTDTKGVETIEGSYSTVRKCGRMAGGVSETNFNGEKTSAHRFWWQPFSEVSGYHFAETSVLASPGKTQVGNFWINGGAWSAFNIPGQIVNWFCSTYPGQLIPVRGLRGANFILKSDTLDYQNVFYHDMINQFPAVMALDCYSVVRGPGSTGGSLVKLIPGTGLDLMVSPDPDAKYKPFKVRIRYASESNGILNVAKWDQDGTVFWQNQDNPVEQTYTGSMTYKSFKYVETIAVPANEDSFRIVLYSKSGGPMYIDKIELIPLNGSLAEYEAEQDLEKARKAVNALFTDDAKNALKLNITDYAVDQAANLAECVSDEFHAQEKTILLDQVKFAKRLSQARNLLNFGDFKSPDWFGENGWKRSPHVDVASDNPIFKGHYLHMPGANQPQMSNIIYPTYIYQKVDESKLKSYTRYHVRGFVGNSKDFELLVERYGKEVHVEMNVPNDIRYSLPTNECGGFERCTHGSYKDTAYTDIDCQCTDMKNRMTTGVYTNMPVDSSIYTNSYHTHKSCRCGNKDVYQNGKHEHKSCGCKDPHVFSFHIDTGCVDTEENLGLLFALKIASTNGVANIDNLEIIEGQPLTGEALARVKKREHKWKEEIKQKRYKTDEAVQAAQIAINALFTNTQYNRLKFDTLFPHILHADELVQRIPYVYHPFLRDADPDVPGINYVIFQQLVELVGRARGFYDMRNLVQNGTFSSGTGSWCVTDDVTTESEGNASVLVLLEWSDKAVQHLRIDAERGYVLRVTARKEGNGDGYVVIDDCDYQQEKVTFTACDYSMMGASTGTQTSVIPATNYPPCHSGTWGEEMTTPVTMLSGYVTKTAEIFPDSDRIRIEIGETEGTFKVESVELICMDQMEDAGNFEDEM

SEQ ID NO: 86 - protein, 760 aa, Artificial sequence
  Synthetic polynucleotide or polypeptide
MHYKDWLAMFPDRAPVYPAEGYNVDLKTAITTSVSIVFSLLNSVIPGIGLVGEAINMMINWLWPNSTEDVWQAFMNAVEDLVDQKIAELERARAISKLEGLHKVLNLYVDAVDNLQQDPQNEKLKETVRIQYQIANSEITATIPELRIPGYEIPMLTAYAEAANLHLLLLRDGVKFGAGWGLDPLTISLHQGYLETGIRVYTDHCVKIYNEGLEKTKTKKANVRDFEKYPWAKYYRYPNVGGSPEQDYQNMENWNIYNTYRRDMTLMVLDLVSLWPTYNEKEYPLPVNAQLTREIYTDLRGCYAGSMAVTEGQIIRPPHLFSFFQSATLYTSDLLNPYLGLQQRGHYTLGPSFTTPFIGSPGGTPNTVTATPSDAIINKVDIDTGTQLYRFMFYQEYGTRPFKTVGGDYHSSVGYVTTINRIPIEGDQTLANHRMSWISGYTRPPSPGPMGTTIPPYLSCMALGWTHISADLDNKIFSDRITQIPAVKGYWTRGSVWFLDGPGSTGGDLVVLAPSGEVSIKVTPSRPGIGQFRVRIRYAATANGKLNVKKYVNSIHASISYDYKQTTSGDLTYSSFQYLEVYNFNLVESQFEVWLTNESGGPITIDKIEFIPLTPRPEPPVPVGTYQIVTALNNSSVVDWAVNTEFIQLWQNGNGNNQKWYFVYDESKAAYQIESLANRNYVISWEGTYTVLAKPKRQTYVDNQYWILEDAGSGYFYVRNKLNVNWALDVNAKVTANGTRIGTNPFNGGASQKFKLNTLN

SEQ ID NO: 87 - protein, 1294 aa, Artificial sequence
  Synthetic polynucleotide or polypeptide
MTTVSDLYSTVPYNVIVAPIIRSTNNNLYTGTIQEVIDSWNTYGMYSKKSLDIIYNFINSGGDSLTIIKGFLNFASLLPIPGLATGLAFVNFFLGIFFPQKQQIVSVWTQIKDRVEEMINQKIQAAQFESLINKFAGLQNAVIAFQTRVDVATCHGDKPTFYSTNSAQDPCSLNTVQATCVPYACQADNDEVRSTYNALDLIFIKALTDFNVKNLEAFSLPLFTMAATMHLTLIRGAIDYGLQWGLTPQTIEQKRADLQKNIKQYSLIAYNTYNNGLQLVTNQNYPQPSNDMDKFPRDAKIIAVNNYIQSMTINVWDIIAKWPTLDNYNYPTNTELEQSRILSLLSTFYSKPYRPRIVFGQRPFAPGPASITNNTISYFGGELTNVQFIYKQYYNWIKTFNITQTIKLPQKEMTFVGGNEPNNNKITSPLYSITRFNPLICADMFTIDPGTFMLKWLNNNNVVWPLISNLCLGSPSGFWQKPVCCKPNTFLSDQKVYAFYPLLKYDSPPDTIKSGEEPNFEDTIIGYVNSNITPENIIRQLDNTSKNFIINAFPAEKCDRTATTFKSIPEIVNGANAMKSTINQNLILPITNLLPGSYKIRFRVATSTDVAALKYSIKINSQQIATQKIIQLPNTDTIGKTDNKRGILGNNGYYMLVTAEDPITIPPGNGTLEITNIANTTVILDRIEFSPIPIPIDPTQPLKIPVPETITTSNKINPIWSSNQFFAEVISITGTVTNNGSIKIQLLNDKKIVKEFPVKGNGPTRGMGRCHDASYDINNLQNIQIPEKFNQVQILELSDNHYNCFRGDGNNTYTTDITVTIQPSQFITQEDLKKITAQVNQLFTSSSQTELAKTVTDYEIDQMVMKVGALSDDVFGVEKKALRKLVNQAKQLSKARNVLVGGNFEKGHEWVLGRETITVADHDLFKGDHLLLPPPTMYPSYTYQKIDESKLKSNTRYTVSGFVAQSEHLEVVVSRYGKEVHDMLDVPYEEALPITSDERPNCCQPAGCQCPSCNGDAPDSHFFSYSIDVGSLQADVNLGIEFGLRIAKANGFAKISNLEIKEDRPLTDQEIKKVQRKEQKWKKAFDKEQAELMATLQPTLNQINALYQNEDWNGSIHPHVTYQHLSDVVVPTLPKQTHWFMEDREGEHSGLTQQFQQALDRAFQQIEEQNLIHNGSFANGLTNWTVTGDIHVTIQDDDPVLELSHWDANVSQTIEITDFEEEKEYKLRVRGKGKGTVTVQHGEEELETITFNTTSFTTQEQTFYFEGNTVDVHIQSENNTFLIDSLELIEVIEE

SEQ ID NO: 88 - protein, 1194 aa, Artificial sequence
  Synthetic polynucleotide or polypeptide
MNQNNDNEYEIIDSNASPYPANRKTDYSRYPFTNNPNQPLQNTNYKDWLNMCQENQQYGGNPETLVETSAAVSAGVIVVGTILTGFATTTPVGVVLISFGTLASVLWPTGIEDKTVWEEFMSHGETLFNREFRGIERNRAIQYLVGFQRLLTRYEELLKIWDNAKTASNARAVQEAFGGAERALLSDIPHLQLPHYEQVLLFAYAEAAQLHLNLLKQGVLFYDEWNKNQSITSTPLASSDFYYGQLQKRIKEYTNYCVTTYKNGLDILKKSPNITWDIYNKYRRDMTLVVLDLVALFPNYDIGIYPLTTKSELTREIYTDAINLERSDIQRQPDIDTMEYNLTRSTPEFFSRLFELILFTENTNIGNRLAGIANHASYINDNKAKGTLYGKETNIRDPLDVNLDHPFKISILTDRQIYDNPLDPRSEYIINQIEFYLNKSNDNVNPKMFKYTAGGNLSRDDQKTTIFQLPARQKPLTLPTFNNYSHILSHFSLYKYSTKNILPPLTKVVDTGALGWTHSSVNAFNTIFSNQITQIPAVKAYVKDSTSKVIKGPGHTGGDLVKLDEEIRVLISPENRTINIKEIRIRYAANKNDQMGISIVNSLALRPINIEKTFDGNDYTDLKYENFRYAYIDVNITNLTASIYDLILYSNVWIKDDHIVIVDKIEFSPTKTTNEKQKLEKLKSDVDFLFANHTKRNLKSEITDYQIDQTANQIESLSEDIYPQEKIFLLDTIKHVKQLSQTRNLLNDGDFSSLMNWTTSNTITVQTGNPTFKGYYLYMSGARITEINNTVFPTYVYQKIDESKLKPYTQYLVRGFIESSKDLELFVTRYDKEVHTILNVSDNLPHTNSYEQTNSCEPQPNSFLNETHNTTNQIVQYPSAPYYTPSTSNNSCYCESTMVSSSCQDSHAFSFSIDTGNLDFNENLGIGILFKIYNPDGYATLGNLEVIEKQPLTEEEVNRVKEKENKWRQTRNNQQKETEQAYSQAQQAIDTLFAHSQYQMLKIETTIQDIVGAETFIDKIPYIYNEWLPNESGMNYNMYMELKKQSSHAYTLYDNRNMIQNGNFTNGLTNWHTSPDAEVQQINNTSILVIQNWSTQVSQNINLPQQNHRYLLRVIAKKEGMGNGYVKISDCENYVETLTFSSCDYLNNNIQDENMGYLTKTIEITPHTNQVRIDIGETEGMFKIESIELICMKN

SEQ ID NO: 89 - protein, 336 aa, Artificial sequence
  Synthetic polynucleotide or polypeptide
MKMKKIAPLAVLSTAVLLSPANSFAEGKSIGQPIPIAQMQSLHAKSSKVAVDEQVIKNDMATRIFETVKTDNSFENITKEAGIMVAIADWIPKFTNTSGYISIPEVTIDSYTDGNIELGSYKNDTKSTQKLITPSQTEEEASSFTYTSSDSEKIGLDTDTKVGVDIPFVGEADTTIKTIAEFTFTQTSTKTDSTKKSITYPSQTLECLPGYVTSLIIRTSQANFSGDMEIGGKIINLDQLDLGGFASISSNQDLYKIYKETSSTIPLPAGVVLDDTNQTVKFSRSFPFNGVAGHLTAAEATQVKIESLDKSKKTVIMSLQDYQNQKMRDHVLQQNQ

SEQ ID NO: 90 - protein, 215 aa, Artificial sequence
  Synthetic polynucleotide or polypeptide
MENMTLNTINKNHIFHHSPCRVITLTIPTTSESNFKEIYQVEPEYIPQALQIARLFQGAINPTNLSFDFRRGLDIVDNDPRSMGIAGIQQPVIHQNIRVSDMISQLKTLIANYLEVNISNPDFWNGVEAAITNTFTNLHSQANAAWIFYYSEQSYQTSYYYNTLFAARINGVMRGIVIALDISVNIEKESVLWITTQDRAEYRVTLKGIHMIRLL

SEQ ID NO: 91 - protein, 277 aa, Artificial sequence
  Synthetic polynucleotide or polypeptide
MLDIRADGYLIQYFFQNGGNQKFSVWNDGTISVKHSGQVLDIPNSSTANDAKIIAYRYVGAPNQQFSLVKNGAVTITKPTTGTLPSAPDFQTNNLNEILPDDTTPVITHATYLPYFMVKDPYYNDQQKIQNSPYYILVRRQYWQKITQRVVGAGQSYVYEQTTGVSRTDQTSMTETTEISIGADLGFMFKGFSVGLSTSITKTLSVTKSTSTTESTTKTEKVTDSNPFMHTIARAKYMLINEYYVTRANGEIITTGDVAYWRVPNPNQTVTRTIPRT

SEQ ID NO: 92 - protein, 390 aa, Artificial sequence
  Synthetic polynucleotide or polypeptide
MRSVSKKVMAGLGVGAMSLSIWAPSSQAAAPANNEYHTIHLAANTNIAWDVYKGWQSDDAGIVLWDGARGDNEQFVFFPLDGGAYAIVNKNSGKPVGIGNAFIGSDGVRDFYNDNDQGLRQTSWTGAANEQWYLRDKGNNNFEIVNQGSGKVASWAGVQRYGFKDYVDLDESNPSDNNRVFHIPAARSTFSLPTLPAVGTRPNAPDYNTSGTIDQQLPQTSNSVVVGASLIPSIMVKDNGASDYTKIHNSPYYVLVKEEYWEKVRSEIIPAGATSKYTVKSGVSEIDQKKMSDTLAMSFGSDLGLKFGESSLSIKSSVSRTIQTEVTKTSTNATEETEEKSIPSIPGKNTGFTAYQLVTKYTVKRTDGSVVTDPSIVRDSKQTIARTIAK

SEQ ID NO: 93 - protein, 620 aa, Artificial sequence
  Synthetic polynucleotide or polypeptide
MNTIMDNGGFAKASAGMLDKFDTDYNAVDKFMIDRLPQFTTADYADIGLPYFAILASMHLMLLSDMIQNGSIWNPAKYDPTYIQRIQKELRSRIHLYSKQITDNFNAALKLPAYGGDGYNINLSPTDAGVFAKQKAFIQGVTINCFSLAKMFPTFDKSSYTEDTNLMQSQPIVSPAVYSVSSLPRKIYPSNWPDYTNGWVPYTGREFQSMKVTYNDYGVQMPQLIDMTYNFGNPLSYGFFQGDALSYTLQNNDTDPVVGFQGGGLIGVWHASETPQCTRGQSCYKAPINYKISYIYPSVAPGGNSQSLGDSPFVAYVCVSTPIDLPDTPTFGEVNTDSIIGDIIGKGIPAETGFASSGQNVEIVQEWINGANVVKLATGQSWGMKFVNLTSGNYQVRYRYASMSDNSVFFNLSIPGTSLIYKPITFKSTAYLNSDSVVYVTGQNGDYTLGTASANITIPSNNNVNLFLTNNGSSNIFLDRIEFIPVPKPSNLNYTITSPVQYWQGGGSNQITPDKYPTIWKANPGEAGVSVELTGRDLNTSGVLIGKIGTGNDNDPNTWVTLCPPGSVNPWDSVYNGTNKLTLCNRSIQFTILKLASDKPYDWIQTGVLTGTVDTQRITF

SEQ ID NO: 94 - protein, 1385 aa, Artificial sequence
  Synthetic polynucleotide or polypeptide
MNQNYNNNEFEIMDSGSMGYQPRYPLAQAPGSEFQQMNYKDWMGMCTSGESGELFASSNAIRTGIIAGTAIVSYLLSLAFPIASAVTGILSVLLPIWWPEQAGTPGTTEAQFTWDQMMSAAEELIDKEISTLVRAKAIDSLRILQSRVRDYQQAICNLKTDPDNEVYKADVRREFNDAEDQAKSVIIELQTRDYEIPLLASYAQAANLHLLLLRDVVQHGESWGFSPLEVQQYYSNITTVGNPGMLQLLAIYTDYCVSWYNTGLQQQYNTGNWNKFNDFRRDMTIMALDIVAIWPTYNPKLYAIPTKNQLTRTVYTPLYGSTTKASVAEIESNVVAIPSLFAWLRKINFHLRTVTESGGWSTIAGLQQTFQNTSNTRLWEGAFKGFQTNDIRPLTISSPETSDDIWKIWMDSSASFAYGFWFYFVKSPIQKIMSRQVTNPQGSKYGLPCRGPSLGPCDPCDCSYKISELNEYCDDKNLYSHRFSHLGAGDKWIQKPNVLDYFSFGWTHVSAEPNNLIDTEKITQIPAVKGHYLEGSASTVVKGPGSTGGDLVSLPGKSILDIRMESQQKKVYQLRIRYACQQQASMGVIRFFTDENYSGAFQDFDFSGTYSFPQTYSGGELTYTSFGYVTIPTLLDPDTFGYKNNWEISLRPWSNNNTPIIIDKLEFIPIEGSVEEYEANQNLEKARKAVNALFTNDAKNSLKLHVTDYLVDQAAKLVECMSDEIYPQEKMCLLDLVKVAKRLSQARNLLHHGDFESPDWSGENGWKTSNHVSVTSGNSIFKGRYLHMPGAGNSQFSDKVFPTYVYQKIDESKLKPYTRYMVRGFVGNSKDLDVVIERYGKEVHKNMNVPNDIIPTNPCDREYQVGERAYPVLTNQTIPQDMSCDPCDAGSVMKVQQILVKCEDPHEFMFHIDTGALDTNQNLGIWVGFKIKTTDGRANINNLEVVEANPLTGEALARVKKREHKWKQNWTEKWMQIEKIVQEAREAIQALFTDQNQNRLKSDITMNHILQAEESVQKIPYVYHPFLVGALPPVPGETYDIFQQLSNGVERARSLYGQRNVLNNGDFTAGLSNWQGADVGAVVQQIGNASVLVLSNWSTNLSQNVGVNPARGYILRVTARKEGAGEGYVTISDSTEENTETLKFTAGEEIGSLAQSDTRSPMQERYNARHMANLPSEGYRTNGYASNGMTNDPLENHGANAYSSNNNMNYQSESFGITPYGDANAMMNGPSNNHGANAYPSNNNMNYQSENFGTTPYGDKNTMMNGPSNNYEANAYSGSTNMTNHNAVGCGCGCNTNTYAGENTMRNVPSNHNGVGYGCGCRTNTNSGMDSHASPMTTQNGSSLSGYVTKRVEIFPEMNRICVEIGETSGTFKVESVELIRMDCE

SEQ ID NO: 95 - protein, 328 aa, Artificial sequence
  Synthetic polynucleotide or polypeptide
MKNNEKLKRKILVCGAIASIGTTLVMSSPILGNADQINTSELERGVKVDTAILEWKEPLFKATEIYGKNIVVPSGYVYNGITSHGYNHSYKNLKYHQFSVEADGSPNITNSNNIFVGKTTLTNNTDLEQTLSTNSFTKTILNSVTHSTTHGFKFGTKASAKFNVPFVGETGIELSAEYNFSDTSSQTSSESFNYVASPQNIKVPAHSSTEVIVTLDTVKAKGNVKLLAKMSGDDYGTFHYKSTTGGIGKGYVYSNTFNSLVAYASKFEKLQNISANPDGKTVNIIGSGIYEAEYGTEFTVTATPIDKNGKSVGESYTYKVKPEITKEK

SEQ ID NO: 96 - protein, 973 aa, Artificial sequence
  Synthetic polynucleotide or polypeptide
MSIENNGDLEYITVLEFSKALGIHEATAYKYIKRGFISKIKNIKGRMYIHKDEIEKTKEKANLNPVDDRSSYLTAFEVFEVLKKDGLCIRGTSWIHEKVSNGLIKRYMKFKNKLYIHKEEIKALKLYYFEHYNAHIPSQKIKDYYTINELSLELGIPNDQIYRYIYKNKISTFKLPHSKGNIFFLKSHLSLIKKKIGYIDKYNSKEFLSIQEIINQLAKHRINVTDSSIRHLIHTKRILNYVMHLNKYYCHKNELTQLLNYFTEKGYYAHIDTETQEQEKNKHLTNFLTVKQASEKLQAPPTWLRGLLKDYFPNSTKIPASGGYHWLVSKTDIEKFQKEYYYNHKTRRLHLIDHYDLDTLRSISGFTFDKLRLDIKKGLLTGAIQKNKRYFIPIQNANRYLESLQYVLDIVYDTHKALEDLLKHFNTHPPPSDLIKTSSIYKKWVEIKINSSNARPSSLRGYTLKFINLYDKILSYFHREIWTTSNAIIELFLSNKTLSNELKKIFVQFLSYCDNQNGINRAKKYLYHYAKKDDAYSEKNIYSFEVYHQYYTHVQNIEMHITNATTCRYYANMWAYTIILLTNNWRGTDIVHEFPSIELDSIRADKLSWFKTNKLTMEESQSIINQLYFKLRNAVANKVSVLYNFYVSPNLIESLAYSLVISELHKRNTQNYTALPENSLILGTFFFGKKIVSTRVSGMDQHLNFFNPSPQLKDFDCLTMNRSTMTYLFYSILEEDGEDADLALEITKNTRSHKNSDTTAIYIQAKNKDGSINRVSVNLLNRGMFGWLYNYILLRLKEDLQKRQTIEERTDTIKELRNSISPMELEKWAIFLQNIHTNKNRVIDEIKYLPMEELKTLAIKLFTNQMPSKEKTGQCLVYPNCKRKNLKTCYSCEYFIPEKMVLIEAISELKRLTNSLENTKYDAIRKRDSFFLLNIILLVDESLKAFGIDVVNSFLPLKEKTKILEKVKQRLLL

SEQ ID NO: 97 - protein, 683 aa, Artificial sequence
  Synthetic polynucleotide or polypeptide
MNPYQNTNEYEILDALPNYSKMVNAYSRYPLANNPQVPLQNTSYKDWLNMCQTINPLCTPIDPDINSVAAAIGVIGSILGLIPGPGEAIGLILGTFSSIIPFLWPENKTIIWEEFTHRGLHLIRPELTPAEIEIIVNPLKGYYNALREQLENFEREFAIWDRNKNAATTGDVLRRFSAIDAAIITLKHQLTVDVRNKPALLSLYAQTANIDLILFQRGAKYGDEWVRYARNQPIPFKTSKEYYDSLKAKIEIYTNDIAETYRNGLNIIKNIPKISWDVFNLYRREMTLSALDLVALFPNYDICRYPISTKTELTRKVYMSSFYLQALEQNESIESLENKLTHPPSLFTWLKRLKLYTISENFSPPLRVSSLSGLLAAYSHTHQQQALYSRPPQGITVGEAPEKRIDGFVYKLFMSQNISPNGCYPIGGIPQMSFYISDYSGSLRPNIDYYSASASIYFINSYMNGPQNATKSNNISIRETKHILSDIKMNYSQTGGFYPFHTFGYSFAWTHTSVDTNNLIVPNRITQIPAVKAHVLSTTAKVIAGPGHTGGDLVALINDGSRTGSMNIECKTGSFTQPSRRYGLRMRYAANNLFTVYISLNNQGVGRFDTERTFSRTNNIIPTDLKYNEFKYNNYDKIIMDLPPNTIININIQQVNALSINQFIIDRIEFYPMDQGVEACKME

SEQ ID NO: 98 - protein, 293 aa, Artificial sequence
  Synthetic polynucleotide or polypeptide
MKKKAILFGMLASTLLGGSTFLDTVSAAEIQENQSNVLNKQNSKQQQAIQNIDQNIDNMLKSIPPVLDRPWTRTTLLFGETFKYSGINIKETNVTNVVPLYFGSNTFFNDTNETQTNFTSVFSQEVTKETSTEVQNGFSASATAGGKIGIPFVAQGEVSTTLTYNFSHTNVNTTSVTNKLEVPSQPVNVPAGKVYKCEVYFEKKSTSGNVELYADVLTGAVSGRTVLPIGEALERATNTHGLMKHPSDPNQVRAVGKGTFTTEHGSNFIVKTYDVTSKGKSAKLVDTKVIPIK

SEQ ID NO: 99 - protein, 1214 aa, Artificial sequence
  Synthetic polynucleotide or polypeptide
MNSRNEVFCEKSDQSLYYPLANSPVTINSEPTHLSRSTEINQTAVAATVLKLSWQVVSLVIKQIMAKRKEEELVARILGQVQDMLWEFRNQLWEDMMDAVEILIKKELAERVRQDALLRLTGMNDALTRYKEAAENWQEDKSNPVLMEEVRTQFRATETFITGSMPFFRAPGYEINLLPVYLQAADLHLLLLRDVLIFGTQWGMSAAAVEDYYSGRLGLKELTASYTDHLVNSYNLGLQNAFNQTANLDDKERYPWVTGTTNWYQPVEDWNLFNEYRTEMTTYALDLIAIWPAYDIYKYGAGASIQLTRLLYTDARGSQYPDGTAFSKEQVENSIVKPPSLYGDLWKIDFYKVNNLPTGSLWRQYAGYQITSMPSAYYGAPLIYYPLRGYNYDWNNVGITPTTIPVTAPDGQPREIIYDRNQHGLACYSFEFTYNDFSKRLLGEAPESDPYVSSAWPDITPEEIEQRLVWIGGVVNTQYGSIPCFGFGWTYRNVTLYNTLNPLTINQIPAVKSFLLGNNAVVIKGTGATGGDLVSLPSGNGYCRMQVQISEPKNYLIRLRYASAGASTVNMAIRNYYGGENREQSFQVPSTYDGTNLNYKAFGYLETLAFATNPSNVFFNIEITNSGGNTIILDKVEFIPITGSLAEYESAQILEKARKAVNDLFTNDAKNNLKLNVTDYAVDQAANLVECVPDEFCKQEKMILLDQVKFAKRLSQARNLLNYGDFESPDWSSKKGWKTSPNVYVTSDNPLFKGQYLHMPGGNQSQISNTVYPTYIYQKVDEAKLKSYTRYLVRGFVGNSKDLELLVERYGKEIHVEMDVPNDMQYNLLMNKCGEFNRCEYTSYQVVSDDLCTCQKSAQIEKNCQCNSTMNRTLAGAHISTYSNGNYENKSCGCKSPHNFSFHIDTGCIDTEENLGLLFVLKILSTNGYANIDNLEIIEANPLTGEALARVKKREHKWKDEIKQKRRKTDEAVQAAQIAINSLFTNTQYNRLKFDTLFSQILHADELVKRIPYIYQPFLRRALPTVPGMNFDIFQQLSTIVGTARVLYDVRNLVQNGTFSSGTGNWDVTDGVTTKQEGNTSVLVLSAWGDKASQNLRIDAERGYVLRVTARKEGNGEGNVVIHDCYNEIETLKFTSCDYTDAEISINTQTMMSPMTCIQNEWHEEIVTPVTIPTGYVTKTVEIFPDTDRIRIEIGETEGAFKIESVELICIEHM

SEQ ID NO: 100 - protein, 1169 aa, Artificial sequence
  Synthetic polynucleotide or polypeptide
MSPNNQNEYEILDASSSTSVSDNSIRYPLANDQTNTLQNMNYKDYLRMTEGTNAELSRNPEAFVNMSAQDAVTRGIDIVSTLIKGFSLTIPGIGEAFALLKTLLGLFWPSSGEDVWEAFMKRVEDLVDQKIEIYARNKALSDLGKSGIAVTSYQSALENWEKNPNNARSISLVRERFADAEHTLRTNMSSFTVANYQIPFLATYAQAANLHLLVMKDVQIYGRQWGYTQSDIDLFYREQSEFEAQYSDYCVKWYNEGLNRLRGTGAKQWVDYNRFRREMQVMALDIVALFPNYDVRRYPMETNVELTREIFTDPVGSYVTEQGSNSNRTISWYDIAVAALPSFSTLENLLRKPDFFTLLQEIRMYTSLRQNGTYEYYNYWGGQRLTLSYIYGSSFNKYSGVVAGAEDIIPLGQNDIYRVVWNYIGRYMNSLLGVNPVTFYFSNNTQKIYSKPKQIAAGIKTIDSGEELTYENYQSYSHRVSYITSFQMKFSVGSNEIMGVVPIFGWTHSSASRNNFIYATKISQIPINKASRTSGGAVWNFQEGLYNGGPIMKLSGSGSQVINLRVATDGEGARQRYRIRIRYASDRAGKFTISSRSPENPATYSASIAYTNTMSTNAALTYRTFAYAESGPINLGISGNSRTFDISITKEAGAANLYIDRIEFIPVNTLFEAEEDLDVAKKAVNGLFTNKKDALQTSVTDYQVNQAANLVECLSDELYPNEKRMLWDAVKEAKRLVQARNLLQDTGFNRINGENGWTGSTGIEVVEGDVLFKDRSLRLTSAREIDTETYPTYLYQQIDESLLKPYTRYKLKGFIGSSQDLEIKLIRHRANQIVKNVPDNLLPDVRPVNSCGGVDRCSEQQYVDANLALENNGENGNMSSDSHAFSFHIDTGEIDLNENTGIWIVFKIPTTNGNATLGNLEFVEEGPLSGETLEWAQQQEQQWQDKMARKRAVSEKAYYAAKQAIDRLFGDYQDQKLNSGVEMSDLLAAQNLVQSIPYVYNDALPEIPGMNYTSYTELTNRLQQAWNLYDLRNAIPNGDFRNGLSDWNATSDVNMQQLSDTSVLVIPNWNSQVSQQFTVQPNYRYVLRVTARKEGVGDGYVIIRDGANQTETLTFNICDDDTGVLSADQTSYITKTVEFTPSTEQVWIDMSETEGVFNIESVELVLEEE

SEQ ID NO: 101 - protein, 328 aa, Artificial sequence
  Synthetic polynucleotide or polypeptide
MKNSKKLKRKILACGAIASISTTLVTPLPTLASADQINTSELEKDAKVDTAILEWKVPLFKATEIYGKNIVVPSGYEFHSLTSHGYNTSYKNLEYHQFSVEADGSPIITNSNNIFVGKTTLTNNTDQEQTLSTNSFSKMISNSVTHSTTHGFKFGTKASAKFNIPFVGETGIELSAEYNFSDTSSETSSESFTYIATPQNIKVPAHSSVEVVVSLDIVKAKGDVKLLAKMSGEDYGSFDYFPTTGGIGTSYLYNKTFNSLVAYASKIEKLQNISANPDGKTVNIIGSGIYEAEYGTEFTVTATPIDKNGKSVGESYTYKVKPEITKEK

SEQ ID NO: 102 - protein, 1307 aa, Artificial sequence
  Synthetic polynucleotide or polypeptide
MNQNYNNNEFEIMDSGSMGYQPRYPLAQAPGSEFQQMNYKDWMGMCTSGESGELFASSNAIRTGIIAGTAIVSYLLSLAFPIASAVTGILSVLLPIWWPEQAGTPGTTEAQFTWDQMMSAAEELIDKEISTLVRAKAIDSLRILQSRVRDYQQAICNLKTDPDNEVYKADVRREFNDAEDQAKSVIIELQTRDYEIPLLASYAQAANLHLLLLRDVVQHGESWGFSPLEVQQYYSNITTVGNPGMLQLLAIYTDYCVSWYNTGLQQQYNTGNWNKFNDFRRDMTIMALDIVAIWPTYNPKLYAIPTKNQLTRTVYTPLYGSTTKASVAEIESNVVAIPSLFAWLRKINFHLRTVTESGGWSTIAGLQQTFQNTSNTRLWEGAFKGFQTNDIRPLTISSPETSDDIWKIWMDSSASFAYGFWFYFVKSPIQKIMSRQVTNPQGSKYGLPCRGPSLGPCDPCDCSYKISELNEYCDDKNLYSHRFSHLGAGDKWIQKPNVLDYFSFGWTHVSAEPNNLIDTEKITQIPAVKGHYLEGSASTVVKGPGSTGGDLVSLPGKSILDIRMESQQKKVYQLRIRYACQQQASMGVIRFFTDENYSGAFQDFDFSGTYSFPQTYSGGELTYTSFGYVTIPTLLDPDTFGYKNNWEISLRPWSNNNTPIIIDKLEFIPIEGSVEEYEANQNLEKARKAVNALFTNDAKNSLKLHVTDYLVDQAAKLVECMSDEIYPQEKMCLLDLVKVAKRLSQARNLLHHGDFESPDWSGENGWKTSNHVSVTSGNSIFKGRYLHMPGAGNSQFIDQVFPTYVYQKIDESKLKPYTRYMVRGFVGNSKDLEVFITRYDKEVHKNMNVPHDITPTNPCTGAYQLGEGPMFTNHTKPQDMSCDPCDAGTVMKVQQTLVKCEDPHAFAFHIDTGELDMDRNLGIWVGFKIGTTDGRATVANLEVIEANPLTGEALARVKKREHKWKQKWMEKRTKIETAVQTARGAIQALFTDSNQNRLKPDITLNHILQAETGVQKIPYIYNAFLQGALPSVSGETYDIFQQLSSAVAIARSLYEQRNVLRNGDFIAGLSNWKGAKGAIVQKIENASVLLLSDWSANLSQDVCVNPEHGYILRVTAKKEGSGEGYVKISDGTDDNTETLKFTVGEEMTRLAQSDMRSRIQERYNERNMTNPPSEAYGTNGYVSTPMTDYPTNNYEMNAYPGSTNMTNPNGGCSCGCGTNAYAGENMMQNDSSNDNRLGYGCGCRAYTNNRTDSYASPMTEQNGSSLSGYVTKTVEIFPETNRVCIEIGETSGTFKVESIELIRMDCE

SEQ ID NO: 103 - protein, 514 aa, Artificial sequence
  Synthetic polynucleotide or polypeptide
MENNSDSLILNNPENKYEPIVSFDDYGTADRSGVSFSPSVGIHNPRWMSYLDDSLRISSLSIPGTHGTMARFGPLGTFPGSSSDLSINQTMTLTAQLNAGIRYVDMRCRHYHNTFQMHHGPIFQRAAFGYDVLEPIRTFLRNNPGETILMRLEENYSSTAGPVGNTRSFLQTFNAYRERYPNLFWERMGSNPTLGETRGRIILLHQFNAGIGIAYRTLSIQDNWQIARTGAPGAVYEKWIAIRNHFNRTMADTNRGTPTSRIYLNHLSANVGVPSPPVVTFPWPYPWFVASGYERRTNDSNEALASQSLSNAYSWPDFIRAWTWAGRRVILYAGTNNLTTRRVIDGRINHTGIIAADFPGRGLIEGTIGLNFLQKGRLQGIYKIITRLNNSSLVDMHPSNHNVHLWEDIDQRNAQWNIIFNPERNAYIIRNESNRNLVLAWDVRSPYNNVIAPTFNPDFREHYWILEQNAAGYLIRNYRDRNLVLDVPGSNNGTNITVRPSNNTNNQSFRLQRL

SEQ ID NO: 104 - protein, 515 aa, Artificial sequence
  Synthetic polynucleotide or polypeptide
MKLISKIVMTALIVLSTFAFNLGGQFDKSFLFTSKAYADLIKALPQNASKIELDYAPVYDYDTDGCYATAAISPDGTTNPGLPKSGSPESVCRDVNRLENSNTYSRAKSNNGWTAIMYASYFEKDQAASGPGSAGHRHDWEHTIVWVQDGQVQYVTYSAHGKWYTNPSSDVRFSGNNPKIVYHKSGASTHAFRLANSNDEPPENYYHQWQKLPMVGWNGYPSLAIREKLMTTDFGDATIEIKDGKFEKALNSAKPPINFDPYAPELEDGGTYQIVSTLNNSSVVDLNQADGNVHLWQNGNANNQKWKLVYDSNKLAYQIKNIANQNLVLAWNDLNGSNNVVATSNQNKEEQYWIPAEAGNGYYYVKNKKDSNKVLDVSGNGTTNGTNVTVYNFHGGNNQIFKLSNVTGNLTREVESLYKAQPGQSSRSSNNFSLEHLAAGTKVRVVLEGAGATSLSFKISRDKSGTDPIIWSNVRDGSILTIPSGDDRKNLYISGPPSGYTSNGTFKVKFYALPN

SEQ ID NO: 105 - protein, 278 aa, Artificial sequence
  Synthetic polynucleotide or polypeptide
MAIINLLNELAIYGRRYAEKHQYTYETSYSDESNPIRLSSLNGSIPDPVVTDGINNIVLDRRIISNTTDYTVEGEFSFSNTYASAASSQTINGVTAGRNVTVQLFSNLFFQQIGLSGYVAFEESFTNENKLTLDTDQDFTDRRNIRVPPYHRATGLYTLQQGTFEKASVLECVVTGDGVIRYNRYLPDGSAVPVVQRVRIVDVLQENSTPHFNVVPEQNAVYFTGSGIVSGRLGLQTFIDVTIEPIPGHPGQTQKYQIPVTGRSGLDIPIFDSLGVRE

SEQ ID NO: 106 - protein, 1349 aa, Artificial sequence
  Synthetic polynucleotide or polypeptide
MNQNYNHNGYEVMDSGGMYHQPRYPYAKAPGVEFEQMNYKDWMNRCTNGETGELLGDISDAVKYSLIVTTGIGWALLGLIPVYGPIASAVAGVLNVIIPAIWPDQAGPPGTIAAQITWEKLMTAVEEMIDQEVDTLVKDRALETTRILQSRLRDYQQAICNLKTDPNNEMYKADVRREFNDAEDQAKAAVIQFSPVTGNTAADTKNNVLLLADYTQAANVHLLLLRDVVKFGVSWGFSELEVQQYYSNTTSIGNQGMLQLLSTYTAHCINWYNQGLQQQYNTNDWNKFNDFRRNMTIMSLDIVSVWPTYNPVYYELPTKSQLSRTLNTAYYSTDQRPSMSTLEHLVVPSPNLFKWLREITFGLNRLNPSNLNNKYITYIDKTNQFTLQQNELSETKSGALRVADEIQKVSIPLPTSEDDVWRVEFKYRQSSGLDPVDRYSQDIAHRFDFTKSESKTVSVYPSFGGERQTDFGFPCRPTSSNNSNSCDPCDSNNLCTNEVTNTTNPCNEASLYSHRLNSMGADFFIGSSRTYLTGFGYAWTHISADANNLIDAETITQIPAVKASSVTTGVQIIKGPGSTGGDLVKLGGGNILIATLALKFTVPAGQRQFRIRIRYASNMRTNLTSIMPGYSGVYYPPITTTDLTNLTYDKFSYQDIGTYSFNRSNDSITTLNLRVQGVGSISSVSSFLLDKIEFIPIQGSLEEYQAQEALEKAEKAVNALFTNNGKNALKLNVTDYQVDQAARLVECMSDEIYPKEKMCLLDHVKCAKRLSQARNLLNHGDFESPDWSGADGWSTSNQVSIESDNPIFKGRYLKLPGANQPQFSDQVFPTYAYQKIEESRLKPYTRYRVRGLIGNSTDLEVFVTRYEKEVHKKLHVPNDIIPVNPCTGEYPLEQGAYPVVTNQVIPQNMSCGPCDDGSQMMMQQTSMVCVDPHQWECHIDTGELDMNQNLGIWVGFKIGTTDGMATLDNLEVVEEGPLTGEALARMKKREHKWKQKWNEKQMKIEKAVQGARGAIQALFTNANQNQLQPSITLNEILRAEKGVQNIPYVYHPFLEGALPTVPGEAYDIFQQLSNAVATARALYEQRNVLRNGDFNAGLANWNRTEGANIQQIGNASVLVISDWSTNVSQEVCVHPEQGYVLRVTAKKEGSGEGYVNINDGTGENTETLKFIAGEGTTSATSPMMPPRESYYEQDMANYSSEYTGASTYTTGNSMNYQSESFGINPYGDEYRMNASSPYTGTDCGCGCRTNAYAGDYPTMSDASNGYERNAYPGSMHQTNPMTSNCGCGCHTKPSVSETNMTTYPSESLVGYVTKTVEIFPETNRVCIEIGETSGTFMVESVELIRMGCE

SEQ ID NO: 107 - protein, 709 aa, Artificial sequence
  Synthetic polynucleotide or polypeptide
MNSYQNNHEIVDVQENYGDDSNRYPYANDPNVAMRNTNYKDWMAGNEEIAPSSLALLGVSLGIVTRMITLAGVLGKTPAIVGILTDTLKLVTQGTGDNLLRHVEALIQQTLATQYRNAATGSINGIARAYEEYLLFFNRWFNNRNSNNVRSYALQLESSFASLHGTCTTALAYQSILARRGFETLLLPNYALAANFHLLLLRDAVLYRKQWTSDATNNTRPNSDVNHNILVNRINEYISHCNNWYTNGLNRFGRSTYLDWINFNNYRRDMILLVLDFIPLFRTYDPRQFPVGTNVQLNRVVYTNPIIPIRGFPRTGMPTFGQIEHLVTVSNRSTFLNRMNIYTSFYHQPHNINRDFWSGNENHLSNGTRQFFGHRSDRTPWSNEVGHVDIYSVNMTTHDIDTSGATYGGIHAATFNAVNRSTNVSQRFIYHVPVDTSRFRTREEVVFFPRNDSLGLMPDRHTYTHKLLQMMNMYRTNPNARRALFLHAWTHRSFTRQNGFKADQITQIPAVKTISNSDDCAMTSYAGENMIKLNDLTTGLFYKVTAVDSEAMHTRFNVRIRYASMNNNKLHLVLNGSKVASLNVERTVQSGGSLTDLQYGNFKYATFAGGFKMGSQSILGIFKKIPNTEFVLDKIELIPVCTFVNQSVEETQGYNTYDQSYNNYDENMENTYQPSYDNYNPNSSDTYDQSYNNYDENMENTYQPSYDNY

SEQ ID NO: 108 - protein, 684 aa, Artificial sequence
  Synthetic polynucleotide or polypeptide
MKMGGTYMNQYNNDGYEIIDSNTLPYPPNRNNQYSNSRYPYVNNPNQSMQHTNYEDSLVVSQNIQQYNSCANNSSSIDWTPIVSTGLIVGGTLLSGFIAPVAAAVGTGTVLISVGTVLPILWPGGTNDNNAKWEGFILQGSTVTCEVMTTVAKDFVMAALNGLREQYYLYNTALNYWKTYPDDVNAKNNVQQIFINLYQSTVDKMPTFSMQGYEILLLSVYAQAALLQITLLAESIQYADKWGLARNTGDFYRNQLYQAISKHIDHCEKWYKDGLAKLKSKPGISWGAINTYRREYIINVLNIIATFPGFDLRTYPGTNQTGIQFEFTQQLFTASPDVRNFFGLENINNLENQLISPPELVTHLNRLTFYTHVSEGNTRNFLQRIVNESKRTNSVINDVNSYGLIDERNISASINLPDPNQVIYFADILHHSYYDPSYVTKVGVEGIRAIDFKVGTNNRQTSLIMKYTSNNNPGGDIYQIYSPFPPNIQSINLTNYKYILSRITMTKDYYPVLGAGPLAKSKIYGFNWMHESVNPTNSISSKNKINKNKITQISAVKANTFNGNVIEGPGHTGGNLIQLKPKNYVQINCKIIDTASYKLRIRYTSNTIASSGIRLSLQDRNSYRTNIYGVNNTILNTQKTTSYDNFQYLNTNDILYNSDSILEITLENLSNGIIIIDKLEFIPQ

SEQ ID NO: 109 - protein, 328 aa, Artificial sequence; identical to SEQ ID NO: 95
  Synthetic polynucleotide or polypeptide

SEQ ID NO: 110 - protein, 550 aa, Artificial sequence
  Synthetic polynucleotide or polypeptide
MLQCLCKMKSIYSINNTTRKDDLMKYKDRKDAKRKYKQAILTTVATMTLGVSILGPTVSAFAAEGDNISVINHVETQTENSKLLESKWMNKFNAEMTNLKSVGKFTGTTMSEIYKFANKGPEQLNDTLRAITIASTDLIPYGGMFIAPLIGAIWPQRNDINSQLKALREELTNLVTNEIDNEQLNFLNSEFKTLIDLQRDLEKAINADNSQNADENTKNQRGVWANGIEQSFRRLLDHTSIDKHKITNLPIYIQVALAHLLFLESLKNKAVSSKMNITQQSLKELYTKDGVKPLENDYVLLIMETFYDAPQIKKIKQVPEFHFNPDDAENQIKDLKDRLSKVKVQYKEWEDGVMSAGGFGMVPNKEYEFNIAILEDAISSYEFVEKLYNTTVGDPRIKKLAKDSDEVFVADATYKIVYSKANKIIDFGYEGEDHPVIWYDHSGKNQRWEFKYDADKKAYQIINKANGNVLAYNTFPDTTDTALVTKNEQYPEHYWVLEDAGDGNVLLVNYKDKDKVLDVLEQKTGDGSRVYVRDKLNNSNAQKFKLVISF

SEQ ID NO: 111 - protein, 750 aa, Artificial sequence
  Synthetic polynucleotide or polypeptide
MDSYPKKNEHGILDASSNYSNMTNNYPRYPVANNSQTSMQNTNYKDRMNMWDSNTINYRRIDSSPEAYVSAKSAISTGISIFSKLLSYLGLGLVADSINITMSLVNTLWNEQNNIWDNLLRHVEDLMNQKISDLVLSNANVELTALKRSLNEYAASLENWKKNPGNPNAIEHIKSQFTITHNFFVDRLAVFAHPGYEVLLLSVYVQAANLHLLLLRDASIYGNQWGLARSNSNYYYGRQLYYTNEYTNHCVNWYHNGLNRLRGTTGAHWLNFNRFRTEMTLTVLDIIALFPTYDYRKYPAFTKVELSRVIYTDPVIYDGFSQLPSNNAGNFNDFEREAIGIPSLTKWLKKIEISTGEIRFATNPHTGDWVTNVWNGNTNTFAFTESSSEVVESHGIMTNNRTSLNMNNFDNFRVDLRSHCFSQGAPFYDVFGIGRSQFFNGRTNIIYDNEIGITDRYNRHRHQTTTISLPGANSEQATANDYSHRLADVRNLTGGLRQNPPQQNMGRSSLIGHGWTHVSMKRENILELDKITQIPAVKSNGWMFSGDLLRGPGHTGGDLVTLGNGDRYTLNIIFPAQAYRIRVRYASNGDGEMGIDVNGVGYTRFSIKCTFSHNNYNNLNSQDFCLVDTSFIYNATYTGSKTIWLYSYSTTRVIIDKIEFIPVGIFANQSFEETEGYNQNYSHYDPNMDTTYQPNYDNGYEQNNYDSYDQSCNNTYESNHDCNCNQEYTNNYNQNSGCTCNQKYNNNYPK

SEQ ID NO: 112 - protein, 1073 aa, Artificial sequence
  Synthetic polynucleotide or polypeptide
MRYFTVKETAEQLSLSRSTVYKLISNGNLNAKWISKKEMRITEDEIIKFKENSILITHYPISKVSKKLNMSLQKTRMLLKLGAFPNSIKLGQKYYISKKDVISFSNLLKKKETSYTTKDISKILNIPTSAVLKLIKKKTFSNVFKIPSDKRYFIPKEEFEQHTFFYNNDSYLTIEQVSEKLSSHPEIIQYYIDSNKFPNAIKDLTNTWFILKKDIEDYTGHSNRNDLYLTIEQTSKELCLQPPTIQGYIKSGTFPNAFQNSNHIWLIPKGDIENLKAKNTVPENYISVEETAKRISKHPAIVKKHIRNGSFFQNRIIIKRSAYIPLTDIIDYESMIKIPKGFITVLDACKQLDKDDSSILPLIHNGEFPNAYFNEFQKRYLIPETEITDYINRQETLKGYLSISECAQKLSCTEKEVLQMIKNGDLRFTKKNLQGETLILEKDLQTLISFQKVNKEHLTLMQASKELEVPTKDILKLIQNEKLHSTSFSDAISSNIHTLIPIDTINSLKANKEKNSSIISIELYNTKIATLHFREDLKNTVNLYNEFVLLKISQTRGQEGAFTDKVRSLFNTLNSIILNLPTNITLLNDEEIEEVLNTQNLPLTHKQNFIQFLNYCCSKVPCIFKNTYKIEYNEKLKRDKEIYNKQTFLDFYTYVNNIELHILMAKQHKQYAQTWLFVIMHMINGWRKSTIITELPNLPLEEIEGLNIYALEHLENNGLLINQAQNIINYYYVVCKNIYISKTGSLGQFLCNEDMIISAATALLICELHRRNAKKQERLLGSLDQYSNSHDRFNTFFNKNKKLPKFNSLLMNRSLLTHFFYTITNSGKHSEISHELTKNLRNHRNMNSITAYVQSTNSDGALDTVSLNLFNRGTFGWLYNFIIDLAMNKVTENDLLENRTSIIQAYKKEYSPSQLEDISFLLLKYQNERESIVDKLIQLPKDQVIEIIIKILKGEKPSKTKHVQCITYPQCSYPNFDSCLNCTNAVFNIYLLIGIVEELKNVHTSIKSTNFDTIRYRDTIRFVLILDIINQAISELGKSYIETFINFQVLENIITETNKYFLFDSPNYYIHTK

SEQ ID NO: 113 - protein, 311 aa, Artificial sequence
  Synthetic polynucleotide or polypeptide
MIMITNIEQSTINYMIWYATSYLHANPNTFYNIGLYPYEIHNLSIVPKFNHINVNPSQKDTVIQTIENNTDVEQHRIIEFYETTTENITNYTTAGYSIYEGIKSTFTCNIQVNFLISGGLEESLEIPVHSEYKCYDTETMNTTYSKLWQVKQTVIIPPRSRINANLIIMGTNIKIPMQLSANIKGTHVHNNKSNYFSSLSFQQHDGSKIRAKFCASNLSQDAWPNKPVSFRSPGPYSSLNLKGDAITTIEPGLYAMIRFEQSPINGSSQERKIWYSDQIILRDGREIRLPNFDLLTGKASYIDVDTTIIGN

SEQ ID NO: 114 - protein, 1277 aa, Artificial sequence
  Synthetic polynucleotide or polypeptide
MNQNQNQNQNKNELQIIEPSSDSFLYSHNNYPYATDPDTILKGRNYKEWLNMCTDTDDSRGPEAASTARSAISVAITISTTILGLLGVPFASQIGAFYNFVLNTVWPQGNNQWEEFMRHVENLINERIADYARSKALAELTGLGNNLNLYREAFEDWRRNPTSQEAKTRVIDRFRILDGLFEAYMPSFAVQGFEVQLLTVYASAANIHLFLLRDSSIYGLDWGLSQTNVNENYNRQIRHTATYANHCTTWYQTGLQRLQGTNATSWGAYNRFRREMTLTVLDITSLFSNYDYRSYPTEVRGELTREIYTDPVGFGWQNNAPSFAEIENLAIRAPRTVTWLNSTTINTGRLDAFNSSNLFWATHWQNFSETNSGNIRFDGPTYGTWRGHIFRSDTLEMVNRDIYTITSNAVFAASIGSTGLGVAAARFTLRNLNNNRTEELVYQNPIILPGGTVISELPGENSDTPTATDYSHRLTSITAFPATRGTVPVYGWSSATVNRDNIIEVNKITQFPGVKSHTLNNCQVVRGTGFTGGDWLRPNNNGTFRLTITSFSSQSYRIRLRYATSVGNTSLVISSSDAGISSTTIPLTSTITSLPQTVPYQAFRVVDLPITFTTPTTQRNYTFDFRLQNPSNANVFIDRFEFVPIGGSLSEYETKHQLEKARKAVNDLFTNESKNVLKKETTDYDIDQAANLVECISDECANAKMILLDEVKYAKQLSEARNLLLNGNFDNLDRNGENPWKTSPNVTIQENNPIFKGRYLSMSGANNIEATNEIFPTYVYQKIDEAKLKPYTRYKVRGFVGNSKDLELLVTRYDEEVDAILNVPNDIPHAPTPFCGGFDRCKPHSYPPMNPECHHDVINNIEISSLCQHNKMVDNADISSRHSELGKKHGICHESHHFEFHIDTGKIDLDENLGIWVIFKICSTDGYATLDNLEVIEEGPLGAESLERVKRREKKWKHHMEHKCSETKHAYHAAKQAVVELFTNTKYDRLKFETTISNILFADYLVQSIPHVYNKWLPDVPGMNYDIYTELKNLITGAFNLYDQRNIIKNGDFNNGLMHWHATPHARVEQIDNRSVLVLPNYASNVSQEVCLEHNRGYVLRVTAKKEGPGIGYVTFSDCAKNIEKLTFTSCDYTNGVPNEQSGYPTDEVPSGQHRCDIDRVPYEQSGYRTDGVPYEQSGYRTDGVPYEQSGYRTDGVPYKQHGCHTDGVPYKQHGCRTDRSRDEQLGCRTDRSRDEQLGYVTKTIDVFPDTDKVRIDIGETEGTFKVESVELICMEE

SEQ ID NO: 115 - protein, 1229 aa, Artificial sequence
  Synthetic polynucleotide or polypeptide
MNSYENKNEYEILDASQNNSNMSNRYQRYPLAHNPQTSIQTTNYKDWLKMCQNPHQNPLDMEGYDSNSVVVVSTGLIVVGTLISILSAGLGSIPIIYGTLLPVLWNDPNNPQKTWHEFMSHGETLLNQTISTVERNRAAAYLEGYTTAVKKCEEALNVWLKTPNQANARTVADLYKDTDFLFFTTLPHLKLRGYETLLLSSYTQAANMHLILLKQASKYADQWNAQLSVYVQKTANDYYTDLVKLIGEYTDYCIATYRLGLTTIKSRATSWNIYNMYRREMTILVLDLVALFPAHDIKKYPSGTKVELTREIYTDALGAVALPQNIDAIEQLATRAPNLFSWLKGFKFITTQSTNRYYLSGIANQYSFTNSNGEIWGPISGNPTGVSSDLTIDNNFSIYKLSILRGYQLSPDFSFHNPVHQIDFSTTNNQQGRVQSYKSGGPTPVNPETTAIHLPIDSKCTQNCNPTFNNYSHILSYAKTFTSNLTIGTTSNITSFGWTHNSVDRENTIDLNNITQIPAVKASQVYPENSVIKGPGHTGGNLVRIDSSGYMSIVCKFPLQVKGYRVRIRYAANNRAELYISSAGNSPSKNVDLDPTFSGTNYESLNYTNFKDKETEFIITEGQLVKQSIIFSTNGNVLLDKIEFIPLGTTTYEYEEKQNLEKARKALNALFTDGTNGYLQMDTTDYDINQTANLIECVSDELYAKEKIVLLDEVKYAKRLSISRNLLSKDYLEFSDVFEENGWTTSDNISIQADNPIFKGNYLKMFGARDIDGTLFPTYLYQKIEESKLKPYTRYRVRGFVGSSKDLKLVVTRYEKEIDAIMNVPNDLAHMQLNPSCGDYRCESSSQFLVNQVHPTPTAGYALDMYACPLSSDKKHVMCHDRHPFDFHIDTGEVGTNTNVGIDVLFKISNPDGYATVGNLEVIEEGPLTGDALAHVKHKEKKWKQHMEKKRWKTQQAYDPAKQAVDALFTNEQELHYHITLDHIQNADRLIQAIPYVYHAWLPSAPGMNYDGYQGLNARIMQARYLYDARNIITNGDFTQGLTGWHAAGKATVQQMNGASVLVLSNWSAGVSQNLHVQDHHGYVLRVIAKKEGPGKGYVTMMDCNGNQETLKFTSCEEGYMTKTVEVFPESDRVRIEMGETEGTFYIDSIELICMQGYASNNNPYTGNMYEQSYNGNYNQNTSDVYHQGYTNNYSQDSSSMYNQNYTNNDDQHSGCTCNQGHNSGCTCN

SEQ ID NO: 116 - protein, 1210 aa, Artificial sequence
  Synthetic polynucleotide or polypeptide
MKNVWKVILCSKCIGGKRMSPSNQNEFDIIDVPSNTSVSENFVRYPFANDSNSSTLQNINYKDFLKISEKSNSGYLTDPEAFDDVGSAIFAGLSITAKIMDAFDVPGGDIFNGLLEIIGILWDLQDDTWEAFMEQVEVLIDQKIAEYARNLALTNLKGLENSYKLYLEALADWKQNPTSPSSQERVRTRFRDTDDSLTVFMPSFAVKGYEIPLLAVYAQAANLHLLLLRDSAAYGLGWGLSQLNVNDNYNRQVRLTGEYTNHCVSWYTTGLEKLRGSNAQSWIKFNRYRREMTVMVLDIVALFPNYDARRYPQATTTELTRLIYTDPHGYTIYSPTSQTTIPWYEYGQSFSEIENVAIQAPRLFRWAQKLQIYSKFVRHAPQESHYWSGHTFTFHHTRDDTKTSLTYGDIIDYKYLSEADLSNTDIYKVSSLVASSWGSGVRLLVTKAIFETINTSNKLIDYEYDLQLLSNFFNEWKNTEAELPIQIVNPPIFGDFNQYSHRVAYISHAPIQPYSGAFRNYGLVPVYGWSHVSVDRNNTIYADRISQIPAVKAVQGSGEPYPVVRGPGFTGGDIARLPNNPNVGLWFNSKVESTALNKRFRVRIRYACATGARADFGGLTLPITVQFNQTMSTTTPTRYEDFQYIDISGSFLLTNTNSGFSLVAQSANQTNNLFIDKIEFIPENPALEAESDLEAAKKAVNTLFTNRKNVLQTGVTDYQINQAANLIECVSDEVYPNEKRLLFDAVKEAKRLSATRNLLEDTNFHAINGGNGWTGSTGIEIVEGDILFKDRSLRLPSARETDREIYPTYIYQKIDESRLKQNTRYSLRGFIGSSQDLEIYVLRHQAYRVIKNVSDNLLPNIRPINACGGVDRCSQQKYVNNSLEVNSGLSNGIGASDSHEFSIHVDTGELNYNENTGIWVVFKIATTNGYATLGNLELVEEGPLSGDALERVKNQEKQWQDQMTRRRAETENRYGLAKQAVDRLFVDYQDQQVSPIIEISDLTAAQNLIQSIPYVYNDTLPEIPGMNYTSVTDLTNRLQQAWNLYDLRNSIQNGDFRNGIRNWNVTPGVNVQQMNDTSILVIPNWDSQVSQQITVQPNQRYVLHVTARKEGNGDGYVSIRDGANQTETLTFNTCDYDGSGAYNNQAFNRNNYNGAHNTQTPNTMGMYNDQTSYVTKTVEFIPYTEQVWIEMSETEGVFYIDSVELIVEEN

SEQ ID NO: 117 - protein, 480 aa, Artificial sequence
  Synthetic polynucleotide or polypeptide
MKKSLLVTTAALSLSLTSFAALVPSAAEITNESKVNQNKENDESINVKELFSFNGDAKYDDVKKITTLTEDKNHQAGTMVGKTAMNINHDFIFEADVYLGDKENGADGIAIGFHSGPIGSVGKAGGGLGVLGLEKGIAFEMDTFTNAPEDDDPSFDHNEIKEPHAGFVNTDKNSNYLTALAPMQTITKPNGEWRTVKLKWDARNKILNANLEGENWELKNPEFDPNEKYTFVIGAATGDQKNAHQIRIKEFKAHFTKPVIEANDIEIKKGSSFDPLNTPEIKLKAMDETDGDITDKITVDHNNVDTSKPGNYEVKYKVVNSYGEIGEKIINVTVPVVDDEWENGDTSGWKFYAGENITLLESSEHALKGDHVFYSDKHVGIYKPIQLEEGATYRATVFVKPEKEENVQFHYVKLSLKDDPAGKESKEIFNQNIGSISPIDKGYRKITKEFTVNENETNPLLVLENYQAGYIDSIKITKVK

SEQ ID NO: 118 - protein, 500 aa, Artificial sequence
  Synthetic polynucleotide or polypeptide
MVIRRKRKSFIDSPSIRSSYPNYVDFNGRLTMDRSGFNVNPTVNYTNRNWMNYIDNSRRISELSIPGTHGSMALYGSILGHILINQTMNLDTQLNSGIRYIDIRCRHYYNTFPIHHDLAFQDAYFDDVLVSVINFLRQNPSETILMRVKEEIGFQTPPEGNTRTFGQTFESYWRGKEQYFWNPSNSPISNNPTLGEVRGKIILLQDFKADKMFGMYWNWLEVQDMYELDGNNQIYNKWIAVRDHFFSAMRDRGLIYLNHLSGTGKISTIGEPKPWFVASGFSDRQNDSLPYALYGNPSSNWPDNPRNSPISGPIFYGGTNVLSTRRIRERRFTHTGIVVADFPGKGLIDGTIALNFPGILSGDFQIITALDDSSVLDLNGPYKVTLWSNNKGNHQRWNFTYDQSRKAYVIRSVSNPSLALTWNIQSTNRDVFAIPFVAGLNESYWIVEYFRNGYIFKNKANPNMVLTVVGGETQPGTNLQVSPIAVGNAQIAQTFFNEFI

SEQ ID NO: 119 - protein, 686 aa, Artificial sequence
  Synthetic polynucleotide or polypeptide
MNSYENKNEYEILDASQNNSNMSNHYPRYPLANNPQIPLQNTSYKDWLNMCQTITPLCTPIDIDSKLVATAIGVLGAIFKSMPGPGAAVGLFLKSFSTIIPILWPNETTPIWKEFTKQGLQVFRPELGRDAIEIIGNDVQAEYNALKILMQDFETKFAIWEPNRTRANAIAVTNAFSTVNTQIIRLKERFLIAAENRPAFLNLYAQTANIDLILYQRGAVNGDKWRADINNRSLSPFSSQDYYQSLKVKIKEYTNYCAETYRNSLNILKNKPNITWDIYNRYRREATLGALDLVALFPNYDICIYPIQTKTELTRKVYMTSSYFQDFPRTEALENHITHPPSLFTWLNELNLYTIRETFNPALQVSSLSGLQATSRYTQNTTTFSNPAQGVRNGTPTPIRLDNYFIYKLFMSQYFHPNDCNHSIAGINEMSFYRSDYYGTGPIPAYYSAGGSPNNVIKTYMNGPQNASTSNNISIRETNHILSDIKMLYSRIGGFYPFYDFGYSFAWTHTSVDPDNLIVPNRITQIPAVKAYTLTSPARVIAGPGHTGGDLVALLNDGLQAGRMQIQCKTGSFTQPSRSYGLRMRYAANNAFPVNLSYTLQGGNTIGRSFSTERTFSRSNNIIPTDLKYEEFKYKEYSEIISINLPPNTIITISFQQATGLSNNQLFIDRIEFYPMDQGIVPCTLK

SEQ ID NO: 120 - protein, 1187 aa, Artificial sequence
  Synthetic polynucleotide or polypeptide
MNSYQNKNEFEILDVSSENKHIFERYPLKNKQNRGNLNMDYKDWIVMCETQNGYEPFDVNAPTAVSTLLLTTGTILSLAFPITGAAGIVLGTILPLLWPANSQDVWEKFMNHAVQISNKNLTDAIRITATDRLKGLQNNINLYKKALQDWDHNRDSSQAKERVRDAFRTVNALFEANMPTFQSQKYEIPLLSVYASAANLHLLHLRDSYIHGIKWGFSQKEVDDNYKQQLCNTEKYVDHCVLYYNNGLNDLKSNPNTDWNTFNDYRREMTIAVLDIISLFSNYDVKTYYNMGIKSELTREVYTKGLNLDVIELKRPIAETENLLTRPPHLFTWLNKFEFDTNSNYSPNWYFLAGHRNFYTTTNSSTIDGSIGYGQWGYPGNTRITRNIPKYVYRVTTKSYVKKPTDTPNINEINFSLIDNTPVVYNAGRGNQELRTTVFELPSRSGAPIPTYTNYSHILSYMKSYNNLDRLQANAFAWTHYSVDRLNTIVEDKITQIPAVKANYSHGSNVVKGPGHTGGDLIRLENIEVTCKLSARETRNYKIRLRYAANKDVRVRIQLFNVPNKDFDVKATFSGTDYANLKYAQFDYVDIPVTMVAVTEQRIGLMNLSTDLSAVMLIDKIEFIPSTQSLLDYTQKQNLEKVQKVVNTLFIDDTNGYLQMDTTDYDIDQAANLVECISDELYAKEKMVLLDKVKYAKQLSKSRNLLLNGDFESLDRFGENGWTTSDNISIQADNPIFKGNYLKMFGARDIDGSIFPTYIYQKVDESRLKPYTRYKVRGFVGSSEDLELLVTRYDEKIDAIMNIYDDLATGKFVNSCGGLHRCNLNTTYLEERRVNCPLNTLDYNQEQSNLDNKLKVSQYSCSNYSHKSNKECQDLHPFSFHIDIGELDTNTNLGIWVLFKISNPDGYATLGNLEVIEEGPLIGEALAHVKQKEKKWNQHMEKKRMETQEAYDPAKQAVDALFTNAQREELQYNTTLDHIKNADRLVQSIPYVYHDWLPNAPGMNYDVYQGLNASIMQARYLYDARNVIQNGDFTQGLMGWHATANVDVQQMDGDSVLVLSNWSAGVSQNLHAEDHHGYVLRVIAKKEGSGKGYVTMMDCNGKQETLTFTSCEEGYITKNVEVFPESDRVRIEIGETEGTFYIDSIELLCMKGYNSNYNQNTSNMYNQSYTSNYSQNTSDMYNQGYNR

SEQ ID NO: 121 - protein, 709 aa, Artificial sequence
  Synthetic polynucleotide or polypeptide
MNHNNNEYEIIDSHASPYPSNRNINSSRYPYTNNPNQPLQNTNYKDWINVCQDNQRYGNNAGIFASSETINGVGAGIIVAGTMLGAFAAPVTAAIIISFGTLLPILWKSDAEAKTIWQEFVKIGNRPFNSVVDPAIINLLYETIKGLQSPINEYNRSFYAWEKYRRPTDAISLLSQFSYLHLELGKQLQGTLSGQYKLQMLPGYAQVANWHLNLLQQASVYYDEWVKDSKKPVEIYFEESVTPFNELTTCLDTCSRSHGTGNSAYYKCVLKCHIKEYTNYCSETYQKGLNMLKNSSGIKWNIYNAYRKEITLTVLDLIATFPNYDPDKYPISTKSQFTREIYTDALIDAYANAHFTIDKIENSLTRPPSLVTWINRLDFYTGMFPQNVPGLTANSINYSFTNGNSADSSIYGHRLTGDSRNPIQIPLNQYVYNMLITYLRDNPSVVQKIDFNLTNQQKTTYNTGLTLAPEYQSTITLSLPGKDQSFPPKFNNYTHFLSYVKTAPGDDRPSSSRARNVCFGWMHYSVNDYDVLAGGYNTISNKIITQIPAVKASSISTESQVIQGPGHTGGNLIKLGTRIELDVVFERPLANNYGIRIRYASKGINSLRVDGFWLSAKPVNTEATFTDLNLANLKYENFKYLDINPTIFKNNILEQRFNKLYLENLTSTPGNILIIDKIEFIPVTQSVLDYTEKQSLEKLQKAVNNLFIN

SEQ ID NO: 122 - protein, 1141 aa, Artificial sequence
  Synthetic polynucleotide or polypeptide
MNQDNLNEYTIVDSSTSRLKDSRYLIANNQKNTNHKDWLANCQRNNPNGLYSNVSPSDTAAVSAGVIVVGTMLSVFATGPGAVIISIGTLIPVLWPDLSRPYQVWDQFMNLGESLIGASLQMDARRDANARMNAFKNAYNSYEQAFNDWYKDQGNRAKASLVFIRFEIAHGEFITGLPFLQIEGYREILLPMFAQAANLHLNLLRQGALYANKWNSISRNVDQTSPLVDYTVTLNDAIEDYVNYCTITYNVGLNKLKNSTNISWQTYNTYRREMTLTVLDLIALFPNYSIDKYSIGVKSALTRKTYSNIYGAYNGNRQSFDAIEAVFTLQPSFFTPLRQLTFSPTFESPSIAYISGITNWISRSHSNDVFQGPIFGNMTSQTYTQPIQTCTRVLFTRRRTFIPPGGTFSDEMLACTFYSDQFQIFRYQPGTSIPSNVEQTDIQFADNKQILYSMSMVSPQNPKNIPGVLTHLYSFIWTHRSAIVTNIIAKNVVTQIPAVKAFSNDSQTIVVKGPGHTGGDLVKLNSEIKIRYGMENVNLQGPFHIRIRYAANNAIPMTVHATNWSGDPRFTTERTFSGNNFNDLQYNNFKTVTIKGGNITSISPNLNELWVFNGAANTNNIILIDKIEFVPGPVPPNFGINIEEDNLEKARKVVYSLFTNNENSNLKLEVTDYNIDQAANLVERLSDEIYAREKMILLDKVKTAKQFSQSRNLIQNGDFELFTNKWTTNNNVCIQADSPIFKGYYLNMLRAREIDTTVFPTYVAQKIDESKLKPYTRYRVRGFVASSKDLKLMVTRYGKEINASIDVPNDLAYMQPNLSCGDNHRCESSSQYVSQGYPVPVTDGYASDMYACPSNSGEQHVMCHDRHPFDFHIDTGEIDTNTNVGIDVLFKISNPDGYATLGNLEVIEEGPLTGEVLTHVKQKEKKWKRHMEKKRLETQQAYNPAKQAVDALFTNIQREELQYHTTLDHIQNADQLAQLIPYVHHDLVPDVPGMNYDLYTDLHARITQARFLYDARNVITNGDFTQGLTGWHATGKVDVQQIDGASVLVLSNWSAGVSQNLHAQDHHGYMLRVIAKKEGPGKGYVMMMDCNGTQETLKFTSCEEGYMIKTVEIFPESDRVRIEIGETEGSFYIQSIELLCK

SEQ ID NO: 123 - protein, 250 aa, Artificial sequence
  Synthetic polynucleotide or polypeptide
MEEPQYIKYKKRRDIEIDSEIISDKRKNDYSGDRSFLKLISDVKSECNLQSLELIHEFKSIVDPITRELDFGKILQIANKNLDLVIVSTLNHQLASNQKMQIDNLIDSSKNFILSALGGTYLNEEIQKACTDWIGDIFTNLNSQIQHSWISFYEETRDKTSYRYNVFFIFQRDSFLVVLPIGFDITVHANKETVLHLKPTDSAIYDVSIKQIQIIQPLNSCILWSFFCSSYLYFFTCRHLVSQRRYSIDS

SEQ ID NO: 124 - protein, 476 aa, Artificial sequence
  Synthetic polynucleotide or polypeptide
MNSEQRKHGQNNEYKHQNHGVSCNCGCQQGKYEYEQKQSREEYNNQYMSNGQKQNHENKNYYSCSPTQFNAPNLPDESTRFQTITNINTSDNGHRVLDAMNTTVGQQLEASGSCGRIDVANTVVYEQVRFANETQLFVFYQADDGSFFIANKGNGRVLEVMPFGNGYFLVISNLYNASLNQRIRKEEATTVNFRLRSQNTARTAINICGHAYQSHVKITAIEGIGNQELFRFRPENNENISLPPLPTGGRLGLPPVLTSLNDSGPSPSPTGPNPAPRVNIGSALIPCLYVNDVLSIDRRMEVSPYYVLEYTQYWHRLWSDEILSGNRGGPYEEITGILPNAQESMRNMIDMTIGEDWGLRFGSNSTPFKRGILNSLNNLESYAARDLGSRHSSYGFTNFNPFPVRYSRFVKAHEYTLKRMDGTVVTTPWVALDHRSQYLPRFPLNATVSLQDYKIISSYSSYDLPVLENIDVNKRW

SEQ ID NO: 125 - protein, 562 aa, Artificial sequence
  Synthetic polynucleotide or polypeptide
MFTSGTKNTLKIETTDYEIDQAAISIECMSDEHSPKEKMMLWDEVKRAKQLSQSRNLLPNGDFGDFSGNDWTFSNDIIIGSNNPIFKGNFLQMRGARDIYGTIFPTYIYQKIDESKLKPYTRYRVRGFVESSKDLKLMVTRYGKEIDAIMDVPNDLSYMQPSPSCGDYRCEPSSQYVSQGGYPTLTDGYALDMYACPSSSDKKHVMCHDRHPFDFHIDTGEVDTNTNVGIDVLFKISNPDGCATLGNLEVIEEGPLTGEALAHVKQKEKKWKQYMEKKRWETQQAYDPAKQAVDTLFTNEQELHYHITLDHIQNADRLVQSIPYVDHAWLPDAPGMNNDLYTGLHARIAQARYLYDARNVITNGDFTQGLMGWHATGKAAVQQMDGSSVLVLSNWSAGVSQNLHAQNHRGYMLRVIAKKEGPGKGYVTMMDCNGHQETLKFTSCEEGYMTKTVEVFPESDRVRIEMGETEGTFYVDSIELLCMKGYTSNNNPHTGNMYEQSYNGNYNQNTSDVYHQGYTNNYKQDSSSMYNQNYTNNDDLHSNCTCNQGHNSGCTCNQGYNR

SEQ ID NO: 126 - protein, 677 aa, Artificial sequence
  Synthetic polynucleotide or polypeptide
MNSYQNTNEYEILDGSPNNTNMPNRYPFAKDPNIFPINLNDCQRSPWQDTWESVSDIVTIGVYLIQFLLEPGIGGIPVLLSIINKLIPSSGQSVAALSICDLLSIIHKEIDENTLNRRVADFNGALAVHRTYYLASLQEWLAAGQPKDPANQKLKNVVRDFIDADKAFIALIEGGLSENKAQILLLPTYAQAANVHLLLLRDAVQYKEKWGELLGAEKVGEELISPTMDYNKRLKDAIEQYTNYCVEWYNKGLDQIRQAGTSAEVWSKFNKFRREMTLAVLDIIAIFPTYDFEKYPLATSVELTREIYTDPVGYSGGNYGWERFFSFNSVEANGTRGPGLVTWLQAIDIYDQSVNLQLGYLRGWGGTRHHEDYTKGNGAFSRISGTTSNNPHPISFGTTDIFKIISLGRYAMQPFVGYSIPRHLVSRAEFFPTTLNTFLYEVNSSGYSQTIESVLPGINKDLPPSRTNYSHRLSNAACVQNETSRVNVFGWTHTSMKKDNRIYPDKITQIPAVKAFALPAGTGYAGGYVTAGPGYTGGDVVTLPYQASLKIRLTSAPTNKNYRVRLRYASGGPGPFRVERWSPSSVSNANFARPATGGYSSFDYVDTLVTTFNQSGVEIIIQNLSGYHLIVDKVEFIPIDIQIEKCTKCQFEGDICRCEGVQSLETKKEIVNSLFIN

SEQ ID NO: 127 - protein, 985 aa, Artificial sequence
  Synthetic polynucleotide or polypeptide
MLLTNYSLSKGILINNLSGVMNVLSNSMVPYNVLRNISMPTISGTRWDKEMFSSALDNTSVLLNLIEKGINDGDDLLGLFSFIGLTALEAIPIVGGALSKLISIIFFSSKPSISYQKIWEELVKAINQIVDKKIEEALVSELIQELSGFANVLEEYRDAYDLYNGKRVFEIPDNLTPGEYLVTVFTAANLQFLQRIPRFQNPKFDVVFLPFFVHVAEMHILLIRDAAIHGLEWGMDVKMHQKFKKDLKSYIEEYTTYLLKIYKKGLKEASERELKDKDFPTTRDKKHYINTVRWNVINQYKRGMTLTVFDFAYRWKYYQEDYQNNITLNPIRTIYSDIAGSVYPYEKTTNEIDITIKDRNLKYRGLLKKLQVYHAERIDSIQSTYLRNHEIINGNKIGGNGGRISSLDLEDHINNPLIQVNMWSELVPISLGFKFYNEKEQNIGGGSWWPKPHKFGAYNFVGNKVSSIIGFGKNETGGFNSLDAMTVGFKLDDYDSKNRLFGINKNGESVTKVIDAGNFYKENFKSNIHVADEPIFGDGILQFTNYSSHQNQDSSVTYQIDVDIEGIYQLHTIIGAKKQRDKLSIKVILNDEQQENLITDYFDSSNTWTGMSLNNEWVYKRVLIGNFHLKRGINNITIHNSILQASANIKTWNLGSIELTIDPNSIKDPDVTTLYDKDNYAGTKRFIFEDTRRLIDFNDRTSSIKVGSYVPGLRFYEHYDYRGDFIDLGSGEKLSLKNHKLNKKLSSAKFANLVLYQDDDYKGEKKLIFHDIPVLADFNDKTSSLIVSPNVSSTVRLFEHNFYNGEYMDVSGGQEISLKGHNLNRKISSIKFLKEHEDFNGLYEIVTAINNKSVVDWSKDKNSNVHLWERRNQDNQKWYFKYDSKKQAFQIISKADEYEVLAWNDFKNSMNVFATYNSKKDEHYWILDYLGEGNYLIRNKKKQNLVLDVDGHKTANGTNIKVNEQHALDNPSIEAQKFKINLVDN

SEQ ID NO: 128 - protein, 1222 aa, Artificial sequence
  Synthetic polynucleotide or polypeptide
MKKVWKVILCSKYIGGKRMSPNNQNEFDIIDVPSNTSVSNNFVRYPFANDPNSSTLQNKNYKDFLTMSEKSNSGHLTDPETFDDVGSAIFAGLSITAKILDAFDVPGGDIFNGVLEIIGILWDLQDDTWEAFMEQVEVLIDQKIAEYARNLALTHLKGLENSYKLYVEALADWKQNPTDPRSQERVRTRFRDTDDSLTVFMPSFAVKGYEIPLLAVYAQAANLHLLLLRDSAAYGLGWGLSQLNVDDNYNRQVRLTAEYTNHCMNWYTTGLEKLRGSNAQSWIKFNRYRREMTIMVLDIIALFPNYDARRYPQATTTELTRLIYTDPHGYTIYSPTSQTTIPWYEYGQSFSQIENVAIQAPRLFRWAQEMQIYTKFVRHTPQESYYWSGHTFSFHHTRDNVKTTLIYGDTSDPISVGTADLNNMDIYQVTASAASNWESGVRLVVNQATFEFITTSNQLFYYKYAPEGVNNFFNQWKDTATELPIQITNPPIYGDLNQYSHRVAYISQAPIQPYSGFFRNYGLVPVYGWSHVSVDRNNTIYADRITQIPAVKAVQGSGQPYPVVRGPGFTGGDIARLPNSPNIGLLFNSRVESNAINKRFRVRIRYASNSGATAIFSINHENSASAEVIQMTRTMTTDIPTKYEDFQYVETFLTPHSFSNGNSSWELVALSANQTNNVFIDKIEFIPENQALEVENELETAKKAVNALFTNRKDTLQIGVTDYQINQAANLIECVSDKVYPNEKRLLFDAVKEAKRLSAARNLLEDTDFHTINEGNGWTGSTGIEIVEGDILFKDRSLRLPSAREMEGETYPTYIYQKIDESRLKPNTRYSLRGFIGSSQDLEIYVIRYHAYRVIKNVSDNLLPNMRPINVCGRVDRCSQQKYVNNSLEVNSGLSNGIGAADSHEFSIHVDTGELNYNEDTGIWVVFKITTADGYATVGNIELVEEETLSGEALERVQRQEKQWQDNMTRRRAETDTRYGVAKQAIDRLFVDYQDQQVSPSIEISDLTAAQNLIQSIPYVYNDMLPEIPGMNYTSVTELTNRLQQAWNLYDLRNSIQNGDFRNDIRNWNVTPGVNVQQMNDTSILIIPNWDSQVSQQITVQPNQRYVLRVTARKEGNGDGYVTIRDGANQTETLTFNTCDYDGSSVYNNQALHANNYDINDVYTTQSSNTNSYHTNGVYHDQTSYVTKTVEFIPYTEQVWVEMSETEGVFYIESVEFVVGKD

SEQ ID NO: 129 - protein, 271 aa, Artificial sequence
  Synthetic polynucleotide or polypeptide
MAIIDLLKEIEKFGRNTAPDAGGAYISSGYQSNDPGRIYKFNMFVPDPVVTDNPTNTAMASGFTPNPTSQPIVRTITFNETITDSQSTTTEHGVTAGASVTVKSEAGLLFAKVGVEATVSFEYNYTNSQTKTTEVSRSWTDSIQITVPPGYQTAHSFIVQTGPFNKNVVLECDITGRGYVQISGPYAGTYDWPIAYILSQNGTPNVKRLTDTVSHFTGSGTLTGKMGLQSYVNVVETPLPGRAGQTREYRIPVIGRSGLDIPIFDPVVSRQ

SEQ ID NO: 130 - protein, 275 aa, Artificial sequence
  Synthetic polynucleotide or polypeptide
MAIIDLKQQAETHWKQECSRRGYTYKSVQMSSSNGLNPVTLYNYNMSVTDPIVTDNPTNTAYARGTTPNPTSQPIVRTITFNETQSDSQSTTTEHGITAGASVTVKSEAGLLFAKVGVEATVSFEYNYTNTNTKTTEVSRSWSDSLQITVPPGYVTEHSFIVQTGPYNKNVDLKCDIKGVTTCYCLDNLGYSTTLVDYMGYILMSQGFLIKPLGGGNYQFTGSGKLTGKMGLQSFVNVIERPLLGRAGQTREYQIPLTGKSGLDIPIFDRVVSRQ

SEQ ID NO: 131 - protein, 1345 aa, Artificial sequence
  Synthetic polynucleotide or polypeptide
MNQYYNNNDYEILDTGGRGCQTRYPFAQAPCSELDPTAFCSDTALFVDLNTVRNGVVAGTAIVSYILSLAFPVSSAVTGIISVLLPILWPEEAGPPGTPQAQFTWDQFMGAAEELIDKKILALVRENAINSLQKLQVSIRDYRQAICNLKNEPNNPANKENVRREFNDAEDQAKSVLIDLKTTGYEMPLLASYAQAANLHLLLLRDVVQYGESWGFTALQVQQYYDNPPGQPGNPGMKQLLATYTDYCVKWYNAGLQEQYQTGDWNKFNDFRRDMTLMALDTVSVWPTYDPKFYEVPTKSELTRTVYTPLLGFSGDYLNPQIPIATAESNLVDIPRLFSWLREVRIDSKPRGSGLTQYNICGRQLVSQYTLGNELIEGGFKGELGENRETLMIPSPQVKDDVWRICTTFACHGVEGGGSAPYVYGWSFAFTESSDQDLYYKSPDQGPLGLPCRQRTSDPCDPCYPCEEELPNLSVPCNDKNLYSHRFSYFGAGFAYFTLLGGFRLGYCSYGWTHVSADPNNLIDAEKITQIPAVKGYEIWGGATVVKGPGSTGGDLVSLSSKEFHNKSQYLIRVTAQQKKTYQLRIRYACQEWAQIDIFRLFGINGGQDMNFGGNYYFPATYSGGELTYNSFGYVTLPELLRPGFGYEDLWQISFRRDPGLPFYIDKLEFIPIEGSVEEYEASQALEKARKAVNALFTNDAKNALQLKVTDYLVDQAAKLVECMSDEIYPQEKMCLLDLVKVAKRLSQARNLLNHGNFESPDWSGENGWKTSNHVSVTSGNPIFKGRYLHMPGAGNPQFSDQVFPTYAYQKIDESKLKPYTRYMVRGFVGNSKDLELLVARYDKEVHKNMHVPHDITPTNPCTGASQLREGPMLMNHTIPQNMSCDPCDAETVMKVQQTLVKCEDPHAFTFHIDTDELDMDRNLGIWVGFKIGTTDGMAILDNLEVIEANPLTGEALARVKKREHKWKQKWTEKRMQIEKAVQTARGAIQALFTDANQNRLKPDITLNHILHAEKFVQKIPYVYNQFLLGALPPVPGETNDIFQQLSIVVTIARSLYEQRNVLRNGDFMAGLSNWRGAKGAIVQKIGNASVLVMSDWSANLSQDVCVNPEQGYILRVTAKKEGSGEGYVKISDGTDDNTETLKFKTGEEVMRMAQSDIRSPIRERYHERNMTNPPSEAYGTNGYASMTMNDSSASYGVNAYPGNNNSNYQSESFGITPYGDENPMTDYPSNKYETNAYPGSTNITNNGMGCSCGCRTNTYAGENMMGNDSSNYNGAGYGCGCRTYPNNRTDSYTSPMTAQDSSLSGYVTKTVEIFPEMNHVCIEIGETSGTFKVESIELLRMDCE

SEQ ID NO: 132 - protein, 296 aa, Artificial sequence
  Synthetic polynucleotide or polypeptide
MKKLIFSLVATTMSMGLIFGSAPAKADVNNRNSAYQDIDERVKKMAQSAAWGGQEYRSHNIKDIELKGNLIDGSMIENSEVLTVSSDILENNLGHTVNMPSTGYEHEFEEKTSTTNTSGWTFGYNYNASFSVLMVSASQSFSVDYNMSTSKTVEASEKRKFTVPSIEVPVPAGKKYKVEYVFEKVKVSGKNKIDADLYGDVTYYYNNQPMSPQLLSSVQNIATDKQGFERVMRDSAVGNDRFGIRTTGIGQFSTEFGTRLTRVLTDITDSRNPVKLETKNVPVDFKTLSVDTRLIK

SEQ ID NO: 133 - protein, 695 aa, Artificial sequence
  Synthetic polynucleotide or polypeptide
MNPYQNTNEYEILNASQNNSNIPNCYPRYPLAKDPQTSMQNMNYKEWHNMCTNNNLIPIEPVDVTWQNVLVATFAIGAAVAALLSAPITGGTSIAAGSAIIAAILPLTFPAGSSVPDQLMEATQGLLGPLDVYVRNRANSELLSLRSQLDAFKGLFDYWFNNRQNENAASSVSARFTAIHNNFIGAMELFKIKGYEALLLPVYVQAARLHLLHLRDGITYADEWRLADPTNARPHAGEYHYSEFKKYSAQYADHCELTIKNELNKIETTPDKTWKDYNQYRRIMTLSVSDTVAEFSTFDPILYKGAINKEILTRKIYTDPVRFSPGPSIADDENRYTVPPSNVKQLVSSTLFTSYTPVDPDREQEFTGNRNRYLRILSSKSPLDPHIDGPIIGNSSSRSIPAGIPTNESVYEVGVMGRSGAPRVLGLRWGSLTNFQEFAAGGEVYNLFMDKISMPTRTTAPINNTNFTHRLSDIILPGNGSSFAWTHSEVNPTKNYLSPNRINLISATKAGTYSSIIKGPRFIGGDLVKTEFATNSIPISYLFNPQSPGISTSYRVRVRYGSNAQGSIYFTFGNIRSQSQAIPQTNLNVANFKYEQFRTLEFFTNVVLNAESEMNIYINLTSSGYFVLDRLEFIPMILLQSYNGNYNQNTSDVYHQGYTNNYNQDSSNMYNQNHTNHDNLHSGCTCNQGGSNHFL

SEQ ID NO: 134 - protein, 674 aa, Artificial sequence
  Synthetic polynucleotide or polypeptide
MNSYQNKNEYEILDTSRNNSTMSTRYPRYPLANDPQASMQNTSYKEWLNMCDSNTQFVGDISTYSSPEAALSVRDAVLTGVNTVGTLLSNLGVPLASQSFGIISRLIGILWPGPDPWAALMVLVEELINQRINETIRDNALLELAGLKEIMDLYRTRLNAWRSNNTPANQDAVRAQYRTVDNFFIQNMPKFGREDHGILLLAVYAQAANLHLILLRDADLFGTGWGLDPDEIRDNYTRLQRLIRNYKDHCVTFYNQGLNRFNRSSAQDWVGFNRFRTDMTLTVLDLATLFPNYDPRRYPSAVKTELTREVYTDPVGNTARELPWYNPNNTTFATMENRARRRPSFSTWLNRIRVFTGHLGNFSAERNVWGGHELVENDSNGSEITHRFGNTNTSNTPMQSISFHNVSVFSIDSIAHVLTVGLPPFRQSQYGVSSVTFHTSNINNVPGSLRYEVRNVLLRQNILSELPGENQQRPDARTFSHRLSYISNFDANRGSGGNVSLLTFGWTHTSMDRNNRLERDRITQIDAVKGVGNTNVPSVVIPGPTGGNLVNPGASPARFSLRVQAPPTNYRIRLRFACLSTSRSHIWVRHSGNTHYVDLTCNNVSGRPSNTLLESDFHYIFVPDVFSPSVNSEISFENHSFGTVLDKIEFIPLDIYNNLFLGEREKTVNDLFIN

SEQ ID NO: 135 - protein, 310 aa, Artificial sequence
  Synthetic polynucleotide or polypeptide
MEITDVMQSARRYVDWDVVRNHYGRQDSIRFTPFNYRIRDSIAIPTTTTFDVKPTPEFTSFQILHNDSDSPQSQIVRISEKLTETTTHTTTQGYRLGGEITSTTTGSINANFILANVNIEQTIRLSITGEYNHSSTTSRTYTTERLWEISQPVNVPPFSRVVATLVVMKAQISIPIRLSTNIQGLGETPSFNNILFFANFQDFRNNPIFMGYEAAALADRRWPDRPSVFESGDMGGSLNLVGFGNSHTTPALYSIVRFEQLPLSGYSGETKTWYSDQIQLRDGRILTIPNFDPFNQIAINNDSLEIKNLS

SEQ ID NO: 136 - protein, 310 aa, Artificial sequence
  Synthetic polynucleotide or polypeptide
MEIIDIEQSAIDYMKWYVLTYQKANPNTFCHTGIYPYEICNINSIPEITFYTVNPVQKIIGNQILENHTETAQSQTVRFSEKVIETINNTTTSGYKIGTGIKSISKINVQVNFMISGGFEQELKISFNSEYNHSTTITTTNTNEKLWEITQPINISPYSRVTVSLIAMTVDIKIPIKLSANIKGTHIYNNKNNWFSSISFQQYNGSKLSAIFSAGNLGQSSWPNKPLNFISPGLYSSFNLNGTSITNVNMGLYIKVKFVQNSLSGYLGETKTWYSDQIILRDGRIITLPNFNPLTGTCSTADVEIIIDDD

SEQ ID NO: 137 - protein, 711 aa, Artificial sequence
  Synthetic polynucleotide or polypeptide
MYRWVLVKSYELKNALKQSLLQQKRVVSNLIMGGINMNSYQNKNEYEILNAPSNGFSKSNNYSRYPLANNPNQPLQNTNYKDWLNVCQDNQKYDNNAGGFASSETIAGVSAGIIVVGTMLGAFAAPVLAAGIISFGTLLPIFWQGSDPANVWKDLLNIGGRPIQEIDKNIINVLTSIVTPIKNQLEKYQEFFDKWEPTRTHANAKAVYDLFTTLEPIIDKDLDMLKNNASYRIPTLPAYAQIATWHLNLLKHAATYYNIWLQNQGINPSTFNSSNYYQGYLKRKIQEYTDYCIQTYNAGLTMIRTNTNTTWNMYNTYRLEMTLTVLDLIAVFPNYDPDKYPIGVKSELTREVYTNANSDTFRTIIELENGLTRNPTLFTWINQGRFYTRNSQDILNPHGIFSFTGNQMAFTHTNDDRNIIWGAVHGNVISQDTSRIFPFYRNAPIDKVEIVRHRDYSDIIYEMIFFSNNREVFRYSSNSTIEGNYKRTDSYMIPKQTWKNKEYGHTLSYIKTDNYIFSVVRERRRVAFGWTHNSVDFTNTVKSKEITQIPAVKASYISTDSQVIQGPGHTGGDLIKLGTRMELNVVFERPLANNYRIRIRYASKGINSLRIDGYWLTTKTVNTEATFTDLNLTNLKYENFKYLDIYPTILNANILAEPINKLYLENLTSTPGNILIIDKIEFIPITQSVLDYTEKQNIEKTQKTVNDLFIN

SEQ ID NO: 138 - protein, 746 aa, Artificial sequence
  Synthetic polynucleotide or polypeptide
MNPYQNKNEYEILDSSQNNFTMSINHLQYPLTNSPYPQFSLDNCRRSNAATWVNNIGDAVSESISLVSTILGIFTEPNLWGVFSALIGLLDRMRGALGTPSIAALSICDLLEIIDERVNRSVLNDGIADFNGSLALFQNFLNALNSWRNNPNNSTADELRFRFRASDSEFDRILTNGSLTHGGSLARQDAQILLLPSFAKAAYFHLFLLNEAITSGSNWGLEIRPTINYQEKLENSIRNYTNYCVHWYNQGLEEIRRRNNSGENWLVFHRFRRDMTLQVLDLVATFPNFDTNRYSTSMPITTQLSRVIYTDPIGCVIQSNLNSSWFGPVNGTNFTSLENEIPSPTFSQFLNSINLVDQPLRWGVGTNGGNTWQGNTNSFNFSSSSTVFHESYGRQTGQNIIRGLNGRDVFRIDSRPISLDGHTFGVNRVEFHHTTSSQNSTYTGYLRTSGLNRPVVQNVRTFLPGENSDIPNRENYTHRLSRVANITGGLRHVAVNQDQRSSLLLYGWTHKSLTRENMYNLNEIFQIPAVKTMNTPGIQVIAGPGSTGGDLLRLNPGARVTYNCRPAHPSETPMVVHVRVRYASVGSSTIRIEFTDPSGSFNPQTLTLPNTNSSLNNLQYQNFNMVTTNFARGTSIMQGNFSISIINMSGANLALDKIEIIPVRIGRNISEQAKEFFDKLYNRGCKHYHYSEDACTQGYNNDYNQNSRNMYDQSYNNYDPNMENTYQPSYDDNLKKNDNSSQRLPK

SEQ ID NO: 139 - protein, 1287 aa, Artificial sequence
  Synthetic polynucleotide or polypeptide
MNQYDRNDEMEILDPGMGQPRYPYAQEPNPELQSIHYKDWLAMCERNGNGLTPLRPGTLVSTKDIITTSLDILSTILGFIPYVGGALSAGVSILSSLLGLLWPEPEEPGAPPIDLNVIWKEFMEKVEVLIDQKISQEAFNAAIGRLTGLKRELNLYQDAFENWAEDRDDPREQEAVRNQFRIARSAMVGTIETMRYRGQEVNLLTVFAQAADLHLLLLREGIMYGAQWGMDESEIKDLYTSPSGEGLKDLIPNYTDYCTYWYNEGLKITYTLKPNLSNTERYPWAADKPSWNLRVLEELEGWNLFNDWRRDVTIMALDLVALWPTYDLYYYDNLKYGVKTELTRPVYSQAAGTSWGSILPRDRYEQGIVRSPHLVTWLHSIDFHLNPGPFSVSNSYKHYTGLKLKYYYSGRDYTIYESPLIGITSFSKKTITVEAKYSNNDIFQSDIKHNDAVYTMEFKKNNGSSDQVGYTYTPNYSTLSWPPETDVSNYDHQMSWISGPVELNTIPAFGIEWLHQSCSPFNMIADDTVKNPIITQIPAVKGASIAGNATVIKNPGHTGGDLVQLPANSGSQAQLLISMEAPYSKVGKTYQIRVRYAASSNATLQVDQCAYLGGSCYNSASIPVTATYSNNVLSYKAFQYADVFPITIQSADFSLQFFNRSGGPIILDKIEFIPIEGSLEEYQAKQELENARKAVNALFTNATKNALRLEITDYDVDQAANKVASMSHDRYEKEKMILLDLVKYAKRLSQARNLLNYGDFEFSDWSDEKGWKVSNNVTVQADHPISRGRYLNMPGARISELSRKLYPTYAYQKVDESKLTSYTRYLVRGFVENSKKLNVFVTRYGKDIYTEMNVPSHQVIRNQVARLPNSCGTGQVSGYGISPTMPSDPCQHAYATNESSLMMPSTNGLCEDKQHFLFHIDVGELDTRANLGIEVGFKISSPEGMATLDNVEVIEAQVLTGEALARVKKREQKWKREREHQCMETETAVKIATQALDSLFTSPQKDRLKATVTMQSIVNVERKVNAIPYVSNPYLEDLPGMNTLIFQQLQSVIRNAFELYGRRNVIRNGDFSGGLSNWHATAGADVQERDGRSNVLVISQWDANVSQDVCVQPERGYVLRVTARKEGTGNGYVTISDCTEENTETVTFASHESVPIQRPPVTLPTSSVCDLSKYTDGYDIGASPYIENNIGKGYAESVGTASCSCGSHGIESCSCNGNYMRNGSSERYGAQSYTSTQRMPNRNPSPSSGYVTKIIEMFPETNRIRIEIGETQGTFLVESIELICMED

SEQ ID NO: 140 - protein, 1278 aa, Artificial sequence
  Synthetic polynucleotide or polypeptide
MNQKYHNNKYEIMDSGGMYCQPRYPFAKAPGSEFQHMNYKNRMNRCTNGTTGELFSSARNGVIIASGIGWAVLGFVPVIGPGLSALAGVLNVVIPYLWPEEAGPPGSTAAQYTWEQLMNAVEELIDQRIDNLIRGRAIETTRILQSRLRDYQQAICNLKTDPTNEAYKADVRREFNDAEDQAKSAIIQFNPQTGNGTEDSKNNVLLLADYAQAANVHLLLLRDVVQFGLSWGFSEPEVEQYYSNTSSVGNPGMLQLLAIYTDHCVQWYNAGLANRRATNKWNQFNDYRRDMTIMVLDIVSLWPTYDPRSYPLFTKSQFTRTVNTSLRGIGNHDHSNGALGPDYANFEAVERNVVDVPRLFKWLRKLEMAQGGGVPMPPGAKMFFQNTLSNTIWEGAYIGYPGSLPTQYLNIPSPESNDYVGTVTNCSDIPSVLGAESIIRFIFTFTKSPDQSLGFYHEFYNQRVPFGLPCRVSNLGPCNPCENSCKNEISNTSDPCNDKNLYSHRFAYFGAGEATPIYHALTYFSYGWTHVSADTNNLIDAEKITQIPAVKAYDLENARVIKGPGSTGGDLVEFSSGTTQGKMHMSITPPEGTHSYQVRLRYASNMSTYIGVNQGAPSYAVSTTTNITNLTYDKFDYVTLNYIISFTDVPPGSDFISNVDINVTGTGSGTFILDKIEFLPFEMSVESYQADQALEKARKAVNALFTNDAKNALQLGVTDYDVDQAANKVDCMSDDMFPKEKMILLDQVKFAKRLSQKRNLLNDGDFESPDWSGENGWKTSNHVSVTSGNPIFKGRYLNMPGATSSPFTSNMYSTYAYQKVDESKLKPYTRYLVRGFVGSSKELELFVTRYGKEVHDKMNIPFRSMNTWNQPDSVQDSCGTREVSGYTASSDPCQANAYTTMSMPPTQGLCEEKQNFVFHIDVGEVDQRANLGIGVGFKISSPSGMAQLDNLEVIEANPLTGEALARVKKREQKWKREREHQCTQTEKAVTAAQQAVDSLFTDARKDRLKPTTTMQNIIHAEEKVKAIPYVNHSDFEDVPGMNSDIFTQLQSQVRNALELYGYRNAIRNGDFSSGLATWHATDGADVQERDGRSHVLVLSNWSANVSQDVCVQPERGYVLRVTARKEGAGKGYVTISDCMEENTETVTFTANEEATIPSPPVRPSRSIEPSICDKSRYAESFGIVPNDTNMMKMPQESYRTGTGSCSCGCNNTVHNRSEIYQTKSYQSTPSMPSRNGSSFDYITKTIEIFPEINRVRIEIGETQGTFLVESIELICMEE

SEQ ID NO: 141 - protein, 786 aa, Artificial sequence
  Synthetic polynucleotide or polypeptide
MKKKLASVVTCTLLAPMLLNGNTNHVYAENLSKPIHATQKKEEKELDRKGLIGYYFKGENFDNLTIFAPTLDNTLMYDQQTANSILDEKQQEYQSIRWIGLIKSKETGDFTFQLSDDEHAIIEIDGEIISQRGKNKQVIHLEKNKLIPIKIEYQSDTPLGVDDKTVKELKLFKVNQQNESHPVELDELRNAEFNKKDTKEFLKKSAEMNLFQDRIATEEEDYVDTDGDSIPDLWEENGYTIHKKLAVKWDDSLASKGYTKFISNPLESHTAGDPYTDYEKAARDMPLANAKETFNPLVAAYPIINVSMEKVILSPNENLSNSVESHSSTNWSYTNSEGASVNMGLSFGVSANYQHTETVAHEWGESTGNTSGINTASAGYLNANVRYNNVGTGAIYNVKPTTSFVLDDNTIATITAKSNSTALSISPGDSYPEKRQNGIAITSMDDFNSHPITLNKQQLDQVLNNHPIMLQTSQTEGEYKTKDINGNIVTGGDWNGYIQEIQRKTASIIVDTGEAVSEKRIAAKDYDYPEDGTPSLSLKEALKLGYPEEIKEEDGLLYYNDEPIYEEGIMTFLDEKTAQEVEKQLEDINGKFKDVKQLYDVKLTPEMNFTIKLASLYDGAEETSIITRKVADKIMKGVSNPLGIWYVYPNVKVVEGGITGRNQYQVSTLHLEGEDLTGGLLELSAEAKKKLKKNYQYYLSMYVRTDVADAEVTVGAEGRRGQGTSGVGGESTVEINGNYQRVNVLINNPKSDPITSVYVDSTNNIKIYIDDVTITEVAAMDLTKNK

SEQ ID NO: 142 - protein, 284 aa, Artificial sequence
  Synthetic polynucleotide or polypeptide
MAAQTTNITDVDAQMDKISDFYFKNESEWKDLPEHPGAYHYLLLKSKKTNMDLDLQASNLKNLTYSDLHPEYIGENEFDNTNGSIDQTFTTAAYSHQVTNSASTSVTEGFKVGGKTTLFKLPILLTNGVEITAEFNSATSTTNTVTDTKTLTASPQNIKVPAGKKYLTKVDMAQITFNGDIEFSANGKNVKSTLNTLATYYGPGFPRRDQYPSFTFTTADMWKKLSTSQQNQITGVTFDSSKNLILNGKAHVNGIFGSKLRVSIYDITDSKLSPKLIQQKFMEQ

SEQ ID NO: 143 - protein, 507 aa, Artificial sequence
  Synthetic polynucleotide or polypeptide
MKLEDNITNIKGNKFDTSKELMINDLLLPLQNSNERMTDIKQVLVHYISNVDIEPKDLHNINEIYSRLRDKGLSTHYLIDRTGAIFKLVNENRVAHHGGKENILSVPAYSNEVEKYSIGIGLLGIGTWDEMSNVIPKETYNLVNTSDIGWTDVQYRSLGLLLDDIYKRNPSILREKGLGKRSTTGGGRPFAYSHETIGIQIPKWMDAIRDDVKLSQLSIPGTHDTMSRGPGGDIVQTQSMSLETQLNAGIRYIDIRCRYFDGDFSIHHGPVYLKANFNDVLKTVTAFLKVNPSETVLMRVQQEYSQASNNEFNGRLQKYMENPDYSRFFFDSQDRRIKNPTLKEMRGKIVILLNVAGSSIGLNYPHNFKIQDDYHLTTNWSLYDKWLKVKKHLKQANEMYPNNNTTFINYLSGSVGSFPYFVASGHSSPGTGAPRLSTGLTTPGWSSSYPDFPRTTCFIGICTISFEGTNILTTDYIKKHNLKYTGIVVSDFPGPDLISAVIECNDH

SEQ ID NO: 144 - protein, 959 aa, Artificial sequence
  Synthetic polynucleotide or polypeptide
MNNTTVPYNVLRNNDMSNISGTSWDKDQISKGMENSSILLELIEKGLNDGNDILSLLGFIGMKAIEAIPVVGGTISSLISLILFPFKSKVDYQEIWKQLKKSIEKMVDQKIEEAMMSQLMQEIAGLAAILEEYRAAYDLYNGNKVFNIPDSMTTGEYLTSVFVNANMQFIQRMPTFQNPKYDVNFLPFFVHAAEMHILLVRDAAIYGLEWGMDEAVHQKFKEDLKRLINKYSIYVLNTYQKGLKEVTERELEDNDFPTTWPKDQYKNTVRWNVINKYKRGMSLTVFDFAYKWKYYHESYQKNLMLNPTRTIYSDIDGSVYPYTKETSEIDNIIKDQNLKYRGILKDIRISSFDRIDSIQTTYIRENQYIDSEKAGGSGGKEQLVNLKNPKGNPLTTITTWSELVPSGILLHCNDGSDLGHYGNNRPSTKTAIYNYVGNKVSSIIGFGKNETGGFNSLDAMVVGFRRDDYIPENKFVPVNNNGEPLTKVVDVGNFYEGKFESNIKMIEEPTFGEGVLQFENYSNNLKQESYVTYHVYAEIEGTYELNVLIGATKQKDKIAFKISHNGKLSENFITESFDDGDIWEGMSLNEELVYKRISLGNFQLNKGVNNITIYNGALQASASIRTWNLAALELTITSDSLKDPDITTLYDQDNYTGTKKLIFVDTNRLEDFNDKASSIKAESHIAGIRFYQNYDYTGDFIDLVGGEKISLKNHSFNNRASSVKFANIVLYNKDNYEGSRKFVFEDIPELTDFNDQTSSIVISSNVSGARLYEHANYEGNYVDVVGGQRLSLKNHVLNKEITSIKFFKGDDEILNGIYQIVPAINNTSVIVNLESSYLVYLLGKDSEFAHQWRVEYDESELAYQIKNMSNENIVLTAMIVTEPSYAQGIPNMKNSLQYWIFEYVGNGYYIIKLKANPKLVLDVNGGNPNDGTVIKVNYSHDLNSPNINAQKFRFKNMNN

SEQ ID NO: 145 - protein, 710 aa, Artificial sequence
  Synthetic polynucleotide or polypeptide
MFRVLYIRNYEHTGGIKMNPYQNKNEYEILDTLPNYSNMVNTYSRYPLANNPQVPLQNTSYKDWLNMCQTITPLCTPIDPDINSVAAAIGVIGSILGLIPGPGEVIGLILGTFSAIIPFLWPENKDIVWEEFTHRGLNLIRPELTPAEIEIIVDPLRGYYNALREQLQNFEREFAIWERNKNAATTGDVLRRFSAIEGDIIKFKHQLTVQEKNKPALLSLYAQAANIDLILFQRGAKYGDEWVRYARNQPIPFKTSQEYYCSLKEKIQNYTNYIAETYRNGLNIIKNKPNISWDIFNEYRREMTLSALDLVALFPNYDICRYPISTKTELTRKVYMPSFYLQALEQRESLESLENNLTHPPSLFTWLNELELYTVRENYSPALLLSSLSGLQTKSRYTQDSTIFYNPPQGVGIGIPTRIGLANLFIYKLFMSQYHHPNACLPIAGISDMTFYKSDYNGNASTTQTYQAGRNSNNVINTFMNGPQNASTSNNISIRETKHILSDIKMLHWQAGGLYDFGYSFAWTHTSVDPDNLIVPNRITQIPAVKANVLNSPARVIAGPGHTGGDLVALLNSGTQAGRMQIRCKTSSFTGTSRRYGIRMRYAANNAFTVSLSYTLQGGNPIGTTFVTERTVTRTNNIITTDLKYEEFKYKEYNQIITMTSPQNTIVTIAVQQLNAISNDQLIIDRIEFYPVDQGVVACTVDNNEEKCKV

SEQ ID NO: 146 - protein, 678 aa, Artificial sequence
  Synthetic polynucleotide or polypeptide
MNSYENKNEYEILNASRNNSTMSNRYPRYPLVNDPQASMQNTSYKDWLTMYDRTDIDVLGIRSAIGTGLGIVSTVLGLFGIEGIGEGIGILLGLTDILWPESDGDNQYTWQELMDHIENLMDERLNTEKRKNALDELNGLHATLNEYYAAFKYWDDHPNDPSARSNVAKYFGDAHSFFVNRMNSIFKAQDYEILLLPIYAQAANLHLLLLRDGTIYGSQWGLARANGDFYHERQLYFAAEYSNHCVTWYNTGLAQQKELFAKSPNWNRFNAYRRDMTITVLDIIALFPTYDARLYTNPVKTQLTREIYSDVLNLDVYGVQQTDLNANEAAFTRSPHLVTRLKGFDFYTRTKYAYWRYLAGHTNYFTFTGDGTIYSSSFNNWYDTDMTKSTINIPNYANIYKLWTKSYTHISPYTDPVGISQMQFSLTDNQQLTYTGTSAPRYPVRETFFEIPSTDEKPLTYENYSHILSYMTSAQHFGDKKIGYTFAWMHKSVDFDNRVYPDKITQIPAVKGNYLQSASVTTGPGHTGGDLVYFNRFGTLGINFYFSQPLFYRIRIRYTSQFDNTLYLTSPYYSQTVPIAIPRSNYVDGVPLDPMDFRSFRTVVVPGILSVSSHGNINLEFKSEFGYLYIDKIEIIPDTIPIEKCTKCQFEGDVCTCRCEGVQSLETEREIVNSLFIN

SEQ ID NO: 147 - protein, 657 aa, Artificial sequence
  Synthetic polynucleotide or polypeptide
MMNFYQNKNEYAILDVSQNKSTMSNRYPKYPLANNPHMPMRNTNYKEWLAMCANNNQVPIDPLDNSWASVFAALFASAAAIAGLMSAIPAFSVVATGAALAAALVPILFPSVGPDVFNQLMSATEDLLDKKINDYVRVRANSELQALEAQREFFESAFNYWKANPTNGSAIATVTARFHSVNGAFVSAMPLFRSTGYEALLLPVYVQAARLHLLHLRDGVLFANEWGLAKPDPGYLHDQEFNTRAATYANHCVSTYNQELERIKTASGKTWVDYNRYRRIMTISVLDIASKFSILNPRLYNVPLKEEILTRKLYTDPVHFRPGTSIIADEIKYTVAPSAFRTLKTLTLFRDVPNNAFVGSQNTYAKLTNPVTDFIGPIFGEEKNEAARNIPIPLTFTVNAYGNPRNDSLGVFGLNNDESLRYYAGSALNIGSRTNVSMPGTSDAPVTLANYTHRLSDVIVNVTNGSSFAWTHKEINNTNLIETNKISFIPAIKIASFPDSAKFLNGPGHTGGEIIKLSDPSNLTPQLQYLINVPSATQQPAFRVRMRYVSDVSGAATFHYPGAGNLQAQIQPTPNVPDRDNPRYEDFKTIEFLGQNRSLISGNFIISFNFSGAYAIVIDRIEFIPMILGSTEYEGEQNLERKKVTVNSLFTNGEKVI

SEQ ID NO: 148 - protein, 695 aa, Artificial sequence
  Synthetic polynucleotide or polypeptide
MNSYENKNEYEILDASQNNPNMSNRYPLANDPQIPMRNTNYKDWLNECEGTNNECHSLISPSNMESAVQISLELGFALIGALGGPIGSVISAIGGSLLSLLWGQNQWDASRDMVEELINQRLDENIKAQAEARSRGLQEVFNLYITRLRAWEINPSSSNLSTLRTQFEITDNFLIYNLELFKQGDARPILLPSYAYAATLHLTLLRDSIIYGERWEYDSDQIECNYARLRVGIANYSDYCTTTYHEGLNNLRGSTSSQWIKFNRYRTNLTISALDLAMLFPLYDPRLYPEKVNTELTREIYTDPVGHRDWAQYLLNYFDTLEATGTRGPDLVTGLRGIDIFTHQLQDVFGTVMLRGWGGTLHYERYTGSSDTLQRISGSTSNDVSYIDFNNVDVFRINSVARVAPEVIAAGGGPLYLVSRAAFRWNPQFDVVYDANSPAGIDLTLFESMLPGIRNQEPSYTDYSHKLSNAACVQFGKSRIIVYGWTHKSLLLNNVIKANQISQIPAVKSYYLQNYLAHAYTYVIKGTHTGGDLIHFLKTKEDYNGESAGGGIRLNIYNSTEGQSYRIRFRYAADKAAYFSVALQRGWSSNHFVELEKTYSGNYNDLKYNDFQFAVLSIITPPLPGGANQLYLNMEANSFQSDVNVILDKIEFIPSDVQIKKCTDCQYTAEVCKCRCEGVQSLEKEKEIVNSLFIK

SEQ ID NO: 149 - protein, 702 aa, Artificial sequence
  Synthetic polynucleotide or polypeptide
MFRVLYIRNYEHTGGIKMNPYQNKNECEILDSLPNYSNIVNAYSRYPLANNPQVPLQNTSYKDWLNMCQTITPLCTPIDIDSNLVATAIGVLGAIFKSMPGPGTAVGLFLKSFSTIIPILWPYENTPIWKEFTKQGLQLFRPELGKDAIDIIGNDVQAEYNALKVMMQDFEAKFATWELNRTRANAIAVTTAFTAVHNQIVRLKERFLIAVENRPAFLNLYAQTANIDLILYQRGAVNGDKWVADINNRSISPFSSKEYYQSLKSKIQEYTNYCAETYRNSLNILKNKSNITWDIYNRYRREATLGALDLVGLFPNYDLCIYPIQTQTELTRKVYMSSFYLQGLQNSETLENLLTHPPSLFTWLNELELYTVSEDYSPALRLSSLSGLQAKSRYTQNSTIFYNPPQGVGIGIPTRIGLANLFIYKIFMSQYHHPNDCYPIAGISDMTFYKSDYNGNASATQTYQAGRNSSNVINTFMNGPQNASTSNNISISETNHILSDIKMVHSRTGGIYPLYDFGYSFAWTHTSVDPDNLIVPNRITQIPAVKANVLNSPARVIAGPGHTGGDLVALLNSGTQAGRMQIQCKTGSFTGASRRYGIRMRYAANNEFTVSLSYTLQGGNPIGTSFITERTFSRTNNIIPTDLKYEEFKYKEYNQIITMTSPQNTIVTIAIQQQNPFPNDQLIIDRIEFYPVDQGVVACTVN

SEQ ID NO: 150 - protein, 762 aa, Artificial sequence
  Synthetic polynucleotide or polypeptide
MNFFHIKGNDFFITLKNNKEKIVLHKSEAFKKIHAIQKRRSKRSILSPRILGLFVETLLQVYIGVPRIYNKTPSICLLGVLKIRTIQGVKKMNSYQNKNENENEHEILDASQNNTNMPNRYPFANDRNMFTMSWNNCQGSTWQQTWESVQSIITIGVYLIQFAAAPSIGGIPILLSIINKLIPSSGQSVAALSICDLLSIIRKEVDDSVLNDGVADFNGKLTNYKEYYLASLNEWLKAGKPNDNRLRNVVDYFKKSEEGFNEILAGSLSRQNAQILLLPTFVQAANVQLLLLRDAVQYKKEWGALLSAEKVGLELISPTIDYGQRLKEKIAQYTNHCVYWYQTGLNQIKQAGTSAEIWSKFNKFRREMTLAVLDVISIFSTYDFDKYPFETNIELTREIYTDPVGYSLGTYSWLNNWPGAFNGLEANGTRADGLVTWLLGIGIYSESVSQYFGGWVGTLHSEYYTGSNTTLNRMSGTISNNYLYFNFYYTDVFKIASLGIMNLAGETSPRPEYRVSRAEFHNSRPYTEVYNANNNGLSRMTIESMLPGVKNPGPSYTDYAHRLSNAACVQYGTSRINVYGWTHTSMKRENQIYPNKITQIPAVKGNSLQAGKATSGPGHTGGNLVNMFYASTLSMNCYFSQPLIYRMRIRYSTSFFTPFYISSPHHSGVVSMALPQTNYVKVDGQTIYVDLMDARAFQIIEVPVEFRATSSGYVNLSFSANASYGVFIDKIEFIPINIKTLEYEGSRNLEKTKKAVNDLFIN

SEQ ID NO: 151 - protein, 564 aa, Artificial sequence
  Synthetic polynucleotide or polypeptide
MFTSGTKNTLKIETTDYEIDQAAISIECMSDEQNLQEKMMLWDEVKQAKQLSQSRNLLQNGDFGDFSGNDWTLSNDILIQSSSPIFKGSSLEMLGARNIYGSLFSTYMFQKIDESKLKPYTRYRVRGFVGSSKDLKLVVTRYRKEIDVIMNVPNDLVYRNPSPSCGDDHLCESSSQSVMSQGYNIPVTNGYVSDMSSFQSNPGKKHVKCHDRHPFDFHIDTGELDTNTNLGICILFKISNPDGYATLGNLEVIEEGPLTGETLTHAKQKEKKWKQQMEQKRLETQQAYDPAKKAIDALFTSTQELHYHITLDHIQNADQLVQAIPYVYHDWLPNTPGMNYNLYNNLKVRIEQARYLYDARNVITNGDFTQGLTGWHATGKATVQQMDGSSVLVLSNWSAGVSQNLHAQDHHGYMLRVIAKKEGPGKGYVTMIDCNGNQETMKFTSCEEGYMTKTVEVFPGNDRVRIEIGETEGTFYIDSIELLCMKGYTSNNNPHTGNMYEQSYNGNYNQNTRDVYHQGYTNNYKQDSSSMYNQNYTNNDDLHSSCTCNQGHNSGCTCNQGYNR

SEQ ID NO: 152 - protein, 561 aa, Artificial sequence
  Synthetic polynucleotide or polypeptide
MSTFKFIQLENWKVPVCMSVYLKIIISYFYVGEIIKEIKCIQISILLVLKDYQIMVSMILKSIQIFFGGYIFQVERSGDIMQKNQQQISNFNRSDLIRECTQCKRVDVNYRNSLCVREGAAFSACPTIGQPNIYEWMKNISDNKRLSDLSIPGTHNTMASGANIPPIYNLRFVETQTLSLWNQMAAGIRFLDIRLRYENGSLACYHGIVWLGKYFGDVLELIRDYLVSYPSETIYMRIAQENSNAPVADFVSSVRSYTDSYANGLRYTGGTNNQNPTLAQTRGKFVILLDISGYNSSTHGSTGINYRDSNRQDAYLTIGDAKVAAVLNHLQAANNRGSSNTTIYINYLSANLGEYGDLAGTPFAIAKFVNPRIYNYLINQPFNYVGIVVADYPGGGLIRETIYKNFGLPFSGYYQIVTALNNSSVIDMDREGCYQSGQDCNVHLWTNNRGANQLWSLSYDPSKQAYLIISSQKTDSVLAWNVPSNNRNVIVTRFNPTYDEHYWIIERFQNGYIFKNKKDPNLVLDVVNSAEGNGTNIVVHDRHPLNTTYRNQTFLVRPNLV

SEQ ID NO: 153 - protein, 748 aa, Artificial sequence
  Synthetic polynucleotide or polypeptide
MKKKCKTTGIGKKVIPATVALGILFSTAPIAEHKASAGIATVLDVSITSLGIVKDIYQSLGIEVGDPDLKDYTGPYAENVSYRAPNLKSGEFSISVHHTKNDLNFTRPVKVLYPNGKSEIHNLKSGQQLKITDAGTIVDLNPYAESASEHNLLYITQEQLNEGKTGVALNQSIIIYVEQTSGQNKVLVDEFYKKKFGANSLDGFKGLGVDRFSYLTDEQKKVATMTSHPVDRTVLSNYVTNDSKALADFNNRLGHILGDADQILDTTLAIPDFTLNWGRNYQIIPYKKGTNKVILKSGSKFLSGKEGDPLQYSDSIGDDEVFEFVLIDQKSPDNKIQFHLNNKNGVSLIGNATTRKFGTDENLKPEIHFPEKSNNEIYNWLRSWHPSKINEKQIYDGVRFEFNSEEKAFTKAYDSSGNLIKNSWVNSNEGYSYANSSGIFLKGWQEIEGNTYYFAGWYRTAVVDGNNTEIDGKRYYFDSSGVLQRSAWKKENGNWYYYDKSGVLLIDGLREIDGEIYYLDGFGATTGNKQLADQQVILHFSDRGILERATDLTGKELTTPKTVTLDGKQLAFEKNGVIRKPGLTGKRAYPQPDGTEKNAIHYYSVKDGAHYTGFKTINEKKYYFKDGANYTFDGYQQIDGKRYYFTNEGEAKLTGFDTVDGEIYYYDDKGVKKTGWQEIDGKWYYFKDSGKAAIGWFQGPYETTIHGYGYFWYYGKEDGSIYQDVTVKLHGSDGFKKEYTFDSHGHKR

SEQ ID NO: 154 - protein, 1275 aa, Artificial sequence
  Synthetic polynucleotide or polypeptide
MSCATYKVIGGQFMNQYNGNNKMEVLDLEMDRSRYPYAQNPMSQLQTMNYKDWMHMCTNGEPGELSNSLRNGIIIGTAILSFELSVISPIAAAAVGILSLLLPVLWPEEAGDPGTTQAQFTWDQLMRAVEEIMNRAISDLVRTQAINTLAKLQSSVRDYQQAICNLKNSSPDDPSYDLYKADVRREFNDAEDQAKLAIIDLKSSGYELLLLSSFVQAANVHLLLLRDVVRHGESWGFSALEVQQYYSNTGSIGNLGMLQLLAVYTEYCVKWYNTGLQEQRNTNDWNKFNDFRRNMTIMVLDLVSLWPTYDPKYYPLPAKSQLTRTLYTGLIKGKGVPTSIGDLENYLVAPPSLFRWLRKIDFYVNQNKPESPYLCGLQQSYQHTQSSEVYNTNLQGSISPKMSVITVPSPENQDDVWSIIGKYDPDVASYIGGFGFRFTKSGIQYVEISGFNSVSATTYLGFPCEASIPNDCNPCDPNNSCTSGIINTSDPCNEASLYSHRCSYMGSYFGYYAIASLWYASFGWTHVSAEANTLVDTEKITQIPAVKAYTLTGYASVIKGPGSTGGDLISLSPGSSFKVRMTGTNHPAYQVRIRYASKSTNEELILGRFSYSGASDYQSRFSAPATYSGESLTYNSFGYVTAPASLRYPFHLDWDLELFNNGTSPVTIDKIEFIPIQGTLEEYEAKQSLENARKAVIALFTNDMKHALRLDVTDYDVDQAANKVDCMSDDMFQKEKMMLRDQVKHAKRLSQARNLLNYGDFESPNWSHENGWKVSNSVTVQENHPISRGRYLQMPGARSIEFSDTLYPTYAYQKVDESKLKSYTRYLVRGFVGSATDLELFVTRYGKEVHDNMNIPFSKMSTYNQTASEANRCGTGKLSAYTMSSDPCQTSAYPTNPSGMPMASTQRLCEDKQHFVFHIDIGEIYTRTDLGIGVGFKISSTAGMAQLDNLEVIEANPLTGEALARVKKREQKWKREMEQKCALTEQMVSAATQAVNALFTSPEHNRLKPTITMQDLLNVEKKVNSIPYVQDPYFEELPGMNAVIFQDLQSGVQTAFALYNQRNVIRNGDFSGRLSNWHATAGANVQERDGNPHVLVISQWDANVSQDVHVQPEHGYVLRVTARKEGPGKGYVTISDCTEENTETMTFTSNEMVMTERTSVAPASSACDRLQYTQSYETIYSENNMNNRYTESLGITPCSCGNHGSNTCSCGVSERNMQQSYTATQRIPNRNPQYSSVYQTKTIEMFPESNRIHIEIGETEGTFLIESVELICMED

SEQ ID NO: 155 - protein, 297 aa, Artificial sequence
  Synthetic polynucleotide or polypeptide
MPNGTLNWQRIMEIGARSLGSALGEAIINEIYSSESNNDNEQLIRQAIEEICERIKKIVDQAFLEEYMADCNSIAKRLPTYNESRDPDVLHSIFDEGSNLIERLKRFDTFESITTINYLSTLHLTAIKALSEHNSDFSGYKETLKRFGKDYADWSESHCERLVELIRASTGEPYYSSNSYIIDPPRDHNDDNSHPTLKFHFYFIDNWDLHTNTTLHHYFSNPLELTDRNWWTKEGIGFSATYKLTEEGLHVPAFNNLFQEAMNSVIEMREAFLKERLDVAINMKGTILSACETWRSF

SEQ ID NO: 156 - DNA, 3480 bp, Artificial sequence
  Synthetic polynucleotide or polypeptide
atgggaggaacattcatgaatcaaaataacaataaggaatatgagattattgatgcaaatacttcaccttattctttaaacagaaacaacgattattctagatacccttatgtcgataacccgaatcaaccgatgcaaaataacaattacaaagattggcttactaattgtcaagggaatattcaatatagtcaaaattcagaagaatttatcgaggtgaaagatgcagtaactaaagctttaactatagttggtactgtagttggtgttggaaatccaggtgtgggagctataattacaatattaggagaagtagtaggtttgttatggccttcttctactgataattcacaaaacgtttggattatttttatccaaagtacagaaaaacttatagaagaaactttaacaaacgatgtgaaaaacactgcaataaggactttaatagatgcacaaacagccatgcaaaactatactattgctcttaaatcttggttgaaaaatataaacacatcatcttttcaacttagtgtaaggggttattttgagactgcaagagataaaattgcaactgctttgatttattctaaaagtataccaggtaataaaaataaagaagaagatatactattattagctaattatgcacatcttgcaaatcttcatttacttttatttagagatgtttcaatatatggtaaatattggggttatacagatagagaaatctgtgatttttataatcaccatcaaataccacttactatagaatatactaaccattgtattaaaagttataatgaaggtttaaacatagttgcagaaagagttaattcgactatattccgtgagaattggaataattataatatgtatcgtagagatatgactttaaaagttttagatgttatttctttattttcaatttatgatacacataaatatcctgctactaaaaatatctctcttatttcagatatagttaaatttgaacttacaagagaactttatacaaatgctaattctgctgatgcaccatcttatatttctaacactttacccattatggaagaaaggtttactcgaaattatcatctatttacttggttagaaattttttatttttatacaagacattataatactggagttaaatctttaacggccaataaaaattgcattagagaaacacttataaatggttgccttgaaacttcgacatatggaagcgtagaaacaaatgatagtccttctgaacataatttttttgggaaaaatataaataaaattgtactaacacataatcatgatgcacccactgtcattaaaaaaatggaattttttcaagatacaaaccgtgtaggcatttatgattcagctggttcactatctaatacagaaacaaaaacatttgaaataccttatgcaatagtaaataatgaaattcttaggcatagatgttcttatatgaaaacttatgattaccgtactggagtagaaagacaaatttcatttgcctggacacattattctgtagatcctaacaacacaatttacaaagataaaatcacccaaatcccagccgtaaaagctcatcgaattagctcagattcaaaagttgtaaaaggtcctggtttcacaggaggagatttaatactcctgaaaaataacattgattatttttgttcttcagatgtaagtagtcttttttcttgtcaagttcgtattcgatatgcgtctaatgctcctttaaatacaaatataactctaattggtggaaatcaaagtagtaatgtaacactcaataaaactacgggtaatgatattattattaccaattcagatgacttaaaatatgagcacttccaatatgtaacatttccagatatattcgaaataaatacaaactcaggaagcaagatgttttttagtttattaggattacaaaatgatttatttgctacatggatagataaaatcgaattcattccagtaaccaaacgatatgtagaatggaatgaacaagaaaaagtagaaacaattcgacgacagatgaacaatgtatatagtcatacacaaaatcaatatttaaaacgagaaacgacagattatgaaattgatcaaatcgcaaggaaaatagaaacgatatcagaagaatattatccacaagaaaaaataatgttgctggatgaaattaaatatgtaaaacaatggagtcaatctcgaaatttacttcaaaatggtgatttcacatcatttaatggttggaaaacagaaaatgatgtgacgatacaaacaggaaatccaatttttaaagcatatacgcttcatatggcgggagcacgaacaacagaaataaataatacagtatttccaacaactttgtatcaaaaaatagaagaatcaaaattaaaaccatatacgcgttatatggttcgtggttatatagaaagtagtaaagagttaagcgtgtatattagtagatataatcaagaaatttatacaatcctgaatgtaccaaataatcttgtttacaggaatacgaatgaatccataagctgtctatctcaatcttcctatagttgtgaatctaatatcgtatcttcaacgtgtcaagaatcacatgctttttcatttacaattgatataggaaatttagatttcaatgagaatccaggcatacaacttttatttaaaatttctaacccagatggttacgctacattggggaatctagaaatcatagaagaacgttctttaacagaaaaagaaatacacaatgtaaaagaacgagaacaaaaatggaagcaaacaaaagaaaaagaacaaagagaaacagaaaaaatctattctcaagcccaacaagccgtacaatctctatttagaaatgaccatatgttacaactagaaacaacaatgctagatattgttacagctgatcagttaattgatcaaattccatatgtatatcacgaatggttcccacatgaaccaggtatgaattatacgttatacacggatttaaaacaacaaattccacaggcatatacgttatatcaaaataggaatcttgttcaaaatggggattttagaaagggtacaacaaattggaatacctcaccagatgccaatatacaacaaatggacgatacatcggttcttgtcatttctaattggagtacgcaagtgtctcaacagataaacgtacaaccgaatcatcaatatgtaatacgtgttatcgcaaaaaaagaaggaacgggaactggatatatcacaataagtgattgtgcaaaacatataaaaacattagaattcaacaattgtgaacaaagaaatcatacgatgtgtcaaagtgacctaaactatagtacaaaaataatgcacgttacgccacatgctaatcaaatacgtattgatataggagaaacagaaggaacattcaaaatcagtagtattgaactcctatatgtagatgcataa

SEQ ID NO: 157 - DNA, 3213 bp, Artificial sequence
  Synthetic polynucleotide or polypeptide
atggggaaaaacagaaataacaggagtagggagttgaatacacaaaacactctctggtttccttctaaacaggtaaaagaatatccaattgatatgttgcaagattccttatgtaaaatgccaaatagtaagttgaaattaggaatgcctcctttgtcaaaagcattaagaatgtgtatgcacattgtcctagaatcaattcatcttcgctctaattcagatatacaatttgaagatattatctcttatttatgggttaagaaagaaagtccacaatacttttggaaacaatgtttatctcattcagaatctattgttcaagtttatattccaaaatctataaaaagaaaaatttttgaaagattacaatacatagaggaagagttacaagtatacatagagatgttaaataagtggaagctcgagtcaaacaaaagtcaaattcaagaggaaattcaaataattttaggcaaaatggattgtttatttgaagataccttacgtattttagtaatggaaaaacatgagatagtattattaataatgtatgttcaagttgcgaatcttcatttattattcttattgaaaatgacttcaattaatgaagaaagtttaaatttaacttcagaagaaagatgtatttataagaagaagcttatgcaaaatattaaaatatatactaactattgtattcatcaatataaggaaggattgtctttaataggagaagtgaaaaatcagttagaggatcctattcaaaaatggaatatatataacacctacaaaagggatatgactttaatggtcttggatcttattagtatctggccaacgtatgattatacgtattatcctatgaaaacaaagatagagctttcgcgagaaatttggacgaatatacaagagatttttatgggagaagtcaaagagatttttaatagtaaagagtaccttgtattatgtacagagccgcgtatatttgaatggttagatgtaatggatatttatataaataaattgaatatagccaatcaacagatggataacatagttggtgtacattattcttcatataaaacacaaaataaaaagcaattaatttctaggtggttggggagaagggattacaaatacaagttgaccattccaaactctaaagatattgaaaatattaataaccgagatataaataattctacttttaagatagataagtactatgatgatttagaaaaggaagctcaatttcctaatcatagattatctcgcataggtggaggagtaaataggctagataaaaaaactttattagctgtatcgttagcgtggacacatttaagcgtacaggaagattctaatatagataacaaggaggtaattgttcaaattcccgcctccaaagcgtggacagatgaaaacggcagtcttagagttatagatggaattagtacaggtggccctttagttctcttagaagacacgcctttaacaatacctataagttctaaaatactttgtcaggtacgtgtccgttatgcaagtaatagtaatggtttgttaagaattagaaaagtggcacagtcaggttcatcatcggattgtatgatagagcaggtttatcaagcgacctttgagggaactgaaatggatttgaactttcaatcttttaattatttagatcttaatttactcatagatgctaaaaattacgattacttaattatttttgaaaggtctaaaagtaaatccccaataattattgataaaatcgaatgtattcctgtatgtattacaaaaaagcagtatgaaaataatcagtatattttagaagcgcagaaagctgtaaatcaattatttactaactcatcaaaaaaagaattgcaatttcaaactaccgactatgatgtagatcaagctgctcaaaagatagaacgtatatcagattctatagcgttacaagaaaaaataaatttattacgagatgttaaacatgcaaaacgtttaagtaaatgccgcaacttattacataatgcagattttgaatgtctcgattcaattaatgaaaatagttggcagtttactcatcctgttaggatatcttgcaatagtcctcaatttaaaggttctttccttgaaattcctagtgtgaaccatattataagtaacgataattatttatgcaggaatgtctatcaaaaaattgatgaatcaaaattaaagccttacacaaggtatgttgttaggggagttattggagattgcaatgatttagaaatttatgttacgagatacgggcaagaggtaatgccaattaaaaatgttaagcatttagttcataaagatgttaatacattaaataatacaccttactactttgcattgaaaattgatgtaggtaatgttgacataaaaaagaatcttggtatttgggtagctttccaagttaattctttgagtggatgggcaacattagggaatatagaattaatcgaaatgatgtctttatcaggaacatcattagaaaaaattaagaaaatagagcgacaatgggaagatgagaatgaaaaaagagaattgaacagtaaaacatccattcaactggctgctaacatggtaagtagtttatatgagagttcacaaggcaatgatttaagtatacatacaggtaaacaaaatatctttgaggcactagaaaaggtcaataaaatcccatatatatgtcatccatacttaaagcaagtattaggtaggaattttaaaacatataaacaactgcaggaaaggattaaccgggcatttaatttgttgcagactagaaataaagttaaaaatggcaacttttttgaaggatgtgttgggtggaatacaacttcgggtgttcattttcaaaagaaagagaatgggaattgttcgttgctaataacacactggagtgcaagtgtatttcaagaaatagtagttgaacctacatgtgaatatttattgcgagtaacggccttaaaaaaatcaaaaggaaatggttatgttgtaataagtagttatacatctaaatatatgcaaagcatttcttttacagaaaatgaagagaataaaaataaaaagtgcatcacaaaggcattgagagtttttcctgaaaccaatcgagtgcaaattgaaattggcatgacggatggcatttttttaatagaaagtatagaattaattaaattttaa

SEQ ID NO: 158 - DNA, 3834 bp, Artificial sequence
  Synthetic polynucleotide or polypeptide
atgataggagggcaattcatgaatcaatacaatggaagtaatgaattggaagttctcgatttagaagtgggccgttcaaggtatccatatgcaaaaactccaagggctgaattacaatcaatggattacaaagattggctacatgtgtgtgaaagaaatgatggcttatatccaggaactttagcatcgacacaagacatcattactactagcttagatattgtgggtacgattttgggatttatacctatagtaggtggacctatatcagctggattttctatacttagttctttaattggattactgtggccagagccgacaccagaagagccacaaatagatcctcaagcaatatggattcaatttatggaaaaagttgaagtgctaattgatcaagaaattgcgcaagaagcatataatgctgcaattgggagattgacaggcctaaaaagagctttaaatttgtaccaagtcgcatttgagctctgggtgcaagatccaactgatccagaattaaaagagactttacgaattgaattcttaaatgcacgctctgaaatggcatctacaattgaaacatttaaatataaaggccaagaggtaaacctactcacagtatttgcacaagctgcagaccttcatttgctacttttaagagaagggattatgtatgggttacaatgggggtttgatcaaagaacagttgagtctttttatacaaattctcaaagggaaggtctacatgatttacttcctatatataccgattattgtacttattggtataatgaagggttaaaaataacctttaatctaaccccagatttatcagatacagaaagatatccatgggctaaagacaaagcaccagggaaccttcaagttcttgaagaattagaaggttggaatctatttaacgattggcgaagagatgtaacgattatggcattagatttagttgccttatggcctacttatgacttcggttattataacaatttagagtacggtgtgaaaactgaactcacacgtccggtgtattcacaagcagctggaacctgctggggtagtgtattaccgcgagatcgttatgagcaaggtatcgtccgttcaccacatttagtaacatggttaaactccattgatttccatttaaatcctggaccgttctctgtaagtaatagttataagcattatacaggccttaaattaaaatattattactctggtcgagattatacaatctatgaatcgccattgatagggagtacatcttatagtaagaaaactattaatgtggaagcgaaatatagtaataatgatatttttcaagcagatagtaaacataatgatgcagtatatacaatggatttctttaaaaataatggaaatattgaaaacgttggttatccacgtgatcctaatttttctacattgtcatggcctcctgagactaatattaccaattatgatcatcaaatgtcgtggataagtggacctgtaaattcgaataccattccggcattcagtacagaatggatgcatgaaagttgctctccatttaatgctctagcagatgacacggtagaaaatcctatcatcactcaaattccggcagtaaaagggactaatttatcagggaatgcaacggttataaagaatcctggtcatacaggtggcgatctcgtacagttgcccgcaagttctgcatcacaggctcaattgttaataaatatggaatctccttattcaaaagtaggaaaatcatatcgtataagggtgcgctatgcagctagttccgatgctactttacagatggatcactgtagttttaatggaggaagttgctctaacagtgtaaccgttcctgttaaatctacgtattctactagtgaattaacatatacggcatttcagtatgtagatgtattaacgattactttacaaaatgccgacttttccatagcacttactaataaaggcggtggacctattaccctcgataaaattgagttcattccaatagaaggatctgtagaagaatacgaagcaatacaaactttcaagaaggcaagaaaagcagtgaatgctttgtttacgaatgacacaaaaaccacattacgattggccatcactgattatgatgtggatcaagtagcaaatatagtggattgtatatctgatgacattttcccaaaagaaaagatggttttattagaccgagtaaaacaagccaaacgcttaagtcaggcaagaaatttattaaactttggtgattttgaatctccggattggtcggataaaaatgggtggaaagtaagtaataatgtaacggtccaaacaaatcgtccaatatctaaaggacgctatctaaatatgccgggtgctaggattatcgaattcagtgatacactttatccaacctatgcgtatcagaaaatagatgaatcgaagttacagccgtatactcgttatttagtaagagggtttgtaggaagtagtaaaaaattagaattattagtgacacgatacgggaaggatatccatacggaaatgaatgtaccatcttatcagacagtcaaaaatcaagtagttcggatgtcagatagctgtgttgcgcagcaagtctcaaattatactatctcgccaactatgccgattgatccatgtcaaaatgcatatacaacaaatgaatctagcgtgatgatcccatctaccaatggtatgtgtgaagataaacaccatttcgtattccatattgatgtgggtgaacttgatatgcgagcggatccaggaatagctgtcgggtttaaaatttcttccccagatggtatggctcaattagacaatctagaggtgatagaggcacagccattaacgggtgaagcattggttcgtgttaaaaaacgggaacagaaatggaagagagaacgtgaacaaaaatgtatggagatagaaaaagcggtggattcagcgacacaagcggtggactctttattcacaagtatacagaaaaacagactgaaagctaccacaaataagcaaaatattgaacttgcagaggcaaaagtgaatgccattccatatgtccataattctgaatttgaagctttaccgggtatgagcgatttgattttccaagcgttacaatccgatatcatgactgcatttaatttatatggcagacgaaatgtgatacgaaatggtgattttagtggggggctctcaaattggctggtaacagatggtgcagatatacaggaaagagatggtagacctcatgtgctcgtcatctcacaatgggatgcaaatgtatcacaagacgtgtgtgtacaaccagagcatggatatgttctacgtgtaaccgcaagaaaagaaggatctggtaaaggatacgtcacaatcagtgattgtacagcagaaaatacagaaactgtaacgtttacatccgatgaaatggtcatgacagacagaccacctgtcgcaccaacatcatctgcatgtgatagattacacgatacacaaaattatgaaacagtctatagcgaaaacagtatgaataatggttatgcagaaagttttggtatgaccttatgttcatgcggtagttatggagctaatacttgttcttgtggcatgtcgaaagggaatgtgcaacaatcttataagtctacaccgcctattctaaatcaaaatccgcaattttcttctatgtatctaacaaaaacaattgaaatgttcccggaaacgaatcgtatacgaatcgaaattggggaaacacaagggactttcctaattgacagtattgaattaatttgtatggaagactag

SEQ ID NO: 159 - DNA, 2832 bp, Artificial sequence
  Synthetic polynucleotide or polypeptide
atggttactacaaaactgacacctagactaaaagctcttccagactttattgatgactttaacggtgtatacgggtttatggataacatttctaatctaataggtacaatttttggaattaatactggtgattcatctcttgatgctgtattagagaatcaagagttattacaacaaatgatggatcaaatgaatactatgcaaggcacattggatgacattttgcaaaatcaagggttctccgaagacgtactactacagcttcgaagtttagcaaatgatcaattggaactctcaaagtccattaatacagagcttgtacaaatcgaaggtattctaaatacatatttacctgcaattagctctatggtaaataaagtatatagtcaaacgtcactgattaacaaaaaagtagataaattattacaaatgatggcatttgctttgcaagaacttgattacctgaaagataatgtggtactgaattcgagcgttatagaaatcacgccccatgttcaaaagctagtttatgtgaatagcaagtttcttgctctatcaagaaattatatacaaggaaaaggaatgagtattgatagaatgcaagaacttattcaatgggcaaaatcaatagttgatacagatatgaacagctttgaattttcagtggatacattacacactattataatgggagacaatctatataaaagatccgctttagcaacgtttgccgatgttttattagatgataccgatcaatttggagatttcggtacaccattggcaaaattttatacgttttactcatcgttagcaacgttacaaataaatgcttatctttgtttaactttcgcaagaaaagttttagggcttactcaaattgaatatcaaataacgatgcaagaacgcattagtaaccaaaatcaattgtttataaatttaattgaagataagaatgtttcctcaaatcttgaggtcaaaggaattgctgctaatcaaccgtatacaaaagagataaaatcttttgacctacaagccaaagatgggtatgtatttatcggcttagaatttatttcggatggcaacgaatacaaagtaaaagcttatcaagctaagatagataaaaacttttcagtacttgctgatacagtagaagaaatcataagcgatgatttaatgagggtgttcacatatcttaatgggggatcgagtgggaaatatgtgaagtttcctttgtcaggaaatctaactggtgcaactaatactttaattactcggattggttttggttgtaaaaatgatcaaagcgaagcttctaatctatatgcttatatagatgctgatttttctccatatgatccatacacaggagagataatgaaagagggcacgcaaacaatttcgttagaagggaacaagaatacagttaactcttatggaatatggcctgttggtttattgggagatctttacatggcacctttaaaatctttatttttaagtgtcgatgctgatagtgcctcgtatgttgatgccacagacgcagtacttaattttggtggcgaatcttatcttcctacaatcttgtctaaagaatatgatgctaatcttatcatgtattctcatatcaagaacactgatcaaatagatatgaatatgcttatgaatgggaatttcgaaaaaggtatggacaattgggagcttacggaacctgcggatatagtagaaggagaaggcataaatggttcaaatgctttgagaggccatctaggtggggctaatggtaaagctgtacaatccgtctacttagaaccaaatacaacctataaactaaaagcatacgggaaagtagatgctgatggttcaaaaggggaaattggaatacaagatatatacggccacttttggaaatatcaggagttctcatcattacaatacgctccagttgaattagaacttaaaacaggcgatgacacttcaaatctatgtatatattatcaaagtgttaatggcacaagttggatagataactttgaattatttgatctcacattagaaaaagggaatttaatagcgaatcctagttttatattcggagggatttcgcattggatagccgatgggggagtaactgttgtagaaggaaaagggatgtttaattcgtatgcagcacaaattaagggagaaggtcaaattagtcagaaaatatcaatgaaaccaaacactcactataaactggaagcatatgtgaaagtagaaaatgctaaaactactgcacaaattggatatggacaaagctatgtaacatgtaattcaacttcttttacatcagtcactgtgaaatttagtacgggtgatagccctctcaatacagaagacttggtgtactgtaccaattctagtaatcagggtactgtttgggcagataactttgtgttacaagaagtccctaatttaattgccaatggagattttgagcagcccaatcctgttgcatcttggacactttccccctctgataatggtgaaatttttacagcagataaggggatttatttattaaataatggtcaaattagtcaaaaagtaaaattaaagccgaatacaaaatatacattgacagcatatgtaagagtagcaggtaatggtagtgcaagtcttggatatggaaatactagtacaacatgcacttcacatgaccttaaacaagtgagtgtggactttataactggttctaaccctaataatgatagtgtatacttgtctaatgcaaatacaaaaagttctgcttttggaagtaaatttgagctttacgaatcggaacaaatttaa

SEQ ID NO: 160 - DNA, 1431 bp, Artificial sequence
  Synthetic polynucleotide or polypeptide
atggagaaaaatcaacaacaaatttcaaattttaacacttcaggtttggtacaatctttagtctttacttctgatccacaatatccctggacggattgtcaggatggttttgcttttcaaaattgcaatatttcaaatgtatcaccatgccaaggtctatttggtgacgctgaagatcgaggaactcgacgttggcgatctgaacatttaatccgcgaacaatacaacaatattaattcgtatacggaagatgtagctaccggtaatagaaatagacctgcagctgtcattgcaaatggagatatcactgcctttggacataatcatacatttagtccagagcgtcaatgggatatgatgaggggtacaacctttactcccggattattcgacgtattagccagacctctttattttggcttaggtaatcatgatcttgatactaattgtggttcagatgggaacacctgttttggcgcttccatggatgctttaagatttcatgtatcaggtcatcggttaccatctaatcattttgatatgagtcaagaaggtctcagacttgttggaagttttgcttatcaggttacttttggccgtatatgttccatacaattaaatgattttcctacgtttgatagaaggagtctcgcttctcatatacgtgaaaactacgattggttacgaaccagattacgagtagcaagaaatgacggaagaatcattattataaatcttcatcaacctcacaggttaactcaaagatatagggatttatttcaagaatttggtgttgcagcaatttttggcgggcatttccatagtactgtaggaagttcaggttctgctggaaatatacctatttttttatctgggggtgcatcacaacggacgtatttaattctagaacagtttcaaaatagattagagatttatgctgtaagatgcaatgattggagagggaatagacaacgtgttgcaactattcctataccggagaatattctttatggtaattttaaagttataactgctctcaataatagtagtcttgtagatatgtctcttaattcaagagataattttaatgtacatttatggcatgatcaaaatcaaagaaacgcgcaatgggactttagatataatccagcaagaggtgcatatatgctgagaaatctccataatattaatcgagttttagctgcggatacggttaatactaggaatgtatttgcttacccaattaatgcagcatttaacgatcagttttggattttagaaccaaatcagggtggatatatatttagaaattacaacaatcgaaatttagttttagatgtttctaattccaatacagctaatggaacaaatattcaagtacagacttttaatggttcagctgcgcaaagatttagattacaaagagtataa

SEQ ID NO: 161 - DNA, 903 bp, Artificial sequence
  Synthetic polynucleotide or polypeptide
atgcagaaacgtcaatttctgaatttgaatgaaggagattgtatctatgtatattctggagggaaattagaagctcaaggaaggtatatatgtgttgtggaagataaaaatgaaatgttcctatgttggagaaagcataacgggaatgaaatctatacgaatttgaatgggattagtgtagaaacgatgaatgaaaatacagcctatctgcaaaacacaagagatacatgtgagcgcgaatatacggataattacaatcaaaatacaaatagtacgtatgaacaaggatctaacgatacttatgtgcaagattacaacgactataatcagaattctaatagtatgtacaatcacgaatattattataacaaagattctattcctgtatatgacgaaggtaacaacaataattataatcaacatataaatagtacgtatgaacaaggatctaacgatacttatgtgcaagattacaacaactataatcagaactctaatagtatgtacaatcaaaaatatcattataaacaagattctattcctgtatatgacgaaggtgacaacaataattataatcaacatacaagtagtacgtatgaacaaggatttaacgatacttatgtgcaagattataacgactataatcaaaactctaatagtatgtacaatcacgaatatcattataaacaagattctattcctgtatatgacaaaggatacaacaataactataatcaaaatatgagttgtacatgtaatcaagggcatgacacttaccaccaaaatatagaaaatacgtatgaccaagagtacaacaattataatcaggactatcgcaacaactacaaactaaactctggttgtacgtgtcaccaaggatatgacgataactatcctaaataa

SEQ ID NO: 162 - DNA, 1512 bp, Artificial sequence
  Synthetic polynucleotide or polypeptide
atgaggaataatgaaaatcatgtaagcttaaatactgaaaatacatatgaacctattgcagcttttgatgtaaatggaacatcagatagaactggggtttcatttgacagtcaggtaggaatctctaatccaagatggatgtctcatatacaggattcacgtagaattagtgaattatctataccaggaacacacggtaccatggctcgctttggttttttgggtacaattattggctggagtcctcaactagctataaatcaaactatgactcttacgactcaattaaatgctggaattcgctatatagatatacgctgtagacattataacaattcatttcaaatacatcatggtgcagtttttcaacgagctgcttttggttttgacgttttagacccaatcagaacctttctacgtaacaatccaagtgaaaccattttaatgcgtgtacaagaagaacatactgcccaaggaaatacaagaagttttgaagctacttttgcagaatatcatagtcgatatagagatctattttggagtccaactggtagtgataatccaacactaggagaaacaagaggaagaattattcttttacaacagtttcaaccgccaatgtttggaattagatatgcaaatttaaacatacaagatcaatggcgtgttgatcgaaccgtagacgaagtttattccaaatgggtatctgtgagaaatcattttactagcgcaatgaataatcgtaatactagaatatctcttaatcatttaagtggttctgctggtttccctgcacctatagatttcatatggtggccatatccttggtttgtatctagtggctttgcatctaagagaacatatagtcgttatgaacgaattcaaaataatcctactaatcaatggccagattatccacgtgatgtaagaggagcagtttattttggaggaacaaataaccttgcaacaagtcgaatttttgacggtaggatcaatcatactggaattattgctgcagacttccctggtagaggtttaattcaatctacaattgaattgaatgatcgcttaatccatccttttagtgggactcataaaattataacgacgctcaacaacagaagtcttgtagatatgaatccacagcaaatttcaagagataatcataatgtacatttatgggaagataggaatcaaagaaacgcacaatggaattttgtgtttaacagccaaagaaatgcatatgcaatacacaatatatttaatcgaaatttagttttagctgcaaatacaactggtacttctggaaatgcatttgcttatctatttagaggatacaacgatcaattttggattgtggattctactaataatggaaatatcctaaggaattttgccaatcgaaatttagttttagatgttgctaattcaggtacaaacaatggaacaaatataacagttcacccttttcataatggaaataatcaacgatttatattacaaagagtatag

SEQ ID NO: 163 - DNA, 1032 bp, Artificial sequence
  Synthetic polynucleotide or polypeptide
atgaaagaaaaaacgaaactactaagtaaaaaaatagtaactaattcttctattatagctttaactacatccgttttactgatatcaccagaattaacaaaagcagattctaataacattttaaacaaaggttcggaacaaatacaacgaatgatggcctctgtaaaccgtgatgatgttagaggatttgaagatttattgcaaagttataaagaaccatttatgcgcaccttatatgagagtgttgactatgatattgcagccacaccagatataggcattaattttctttactctcaacaacctagctatgatatcgagttagatacacgctatccagatacagcagattctctatatgtggggattgccaatctgtcacatagtggggggactggtgagcaaatattatattcacaatcattttctaagactattacagaaacaatgactacttctaccactcatggggcgaaagtaggagcaaaagctggtgctaagtttaaagttcctttagttgccgaagcgaacggagaattaagtgctgaatataattttgcaaatgctggtactagcagctccacacaaaccatgacttatacggctccttcacagcctgtaaaacttcaaccaggtgaatcggcaatagttaccgcacatttaaaaacatttcaaagtacaggtaaagtaaaacttcgtacagcatacaaaggaactttagcaatagattataaagacttatcaggagaaccacagcaaataactccaggaatgggtcaatggatacgctttatgcactctttacataatggacctgaatcattcaaagaatatctaggttttactttcaaaaatgaagatgaagcatatcaatatggatatggaacatatagcgcaacatatggaacaaaatttgatgtaaaagtagatatatttaagaatactaataataaaaataaatcaaactttacaactacacctattagaagttattcctatgaagtaactccagaacttataaaaagcaattag

SEQ ID NO: 164 - DNA, 3660 bp, Artificial sequence
  Synthetic polynucleotide or polypeptide
atgaattcaaataataataatgaatacgaaattattgattcaaacaattgcccttatccacctaacagaaagaatgagtatactaaatatccttatgcgaataatccagagcaatatttgccaaacatccctcttgaaaaatggctcagtgatcctcaaactagaataacaacaactctttctataataggcactattactgaattaatgatagcttcatattttggtccgggtgtatttatagtagctgggacagctattatgtcagacttaatacctcttatttgggataatttacaagaaaatcttcctagtggacttataaatgtcacacaagaaatgcttaatacacaactagacgaatatacttatacccaagcaatatatcgatataaaggtttaatagatggttttaaccaattcaagctatattttaacgcgtggaaaaataaccctaatgattttaacaaaatatcagatgtatcaggttattttagaactttaaatggtacatttaatactacaatggctacatttcaacaacaaggttatgaacacatactattaccagtttatgcacaagctgcacaagcacatttacttcatttacgtgatggtatttcatatgctgataaatggaatctaggaagagcaaattatgattcaggagatactcattatcaagaattcatagatgcttgtaaaagatacacaaaatattgtacagagtggtattataaaagtttagacatttttaaaagtaaaaattcaaactggtctgactataatctttaccgtagatttttaacaattactgtgttagatattatttctatgttttcatcttacgatgcacgtttatactctatcccatcaaaagtagaaattcttacaagaaaaatatatgcagatccaattaattattctcaaggtaattctctagcagaagatgaaaaaaatcatacggtagataacctaagattatttactcaattaaataaactagaaattagtagtgatatacaaaatggttttaacggggttactaatttttatagatttttatcacccggcaacagttcaatatcacatttttctggaacaccatttcaatatataagtacagtaccttacactttttatcctactaatgaaacatctttttataaaattaaaacatttaatattaaccaacctagtgctacattagatgcaatagatataatgtatttttatatgtgggatggaaaacaagagcacatacaaagaatacttgcaagtacatctggtaacgaaacaaatccaaaatacgtttatatagctggaaaaaaagatttaaaagatgaaaaaaatagttacagaccaaatgattttaattcattaaattatcataattctactcatgtcttatcagatatgattgtaaatacagccaataaaaatgcaattagttactcttttgcatttacaaataaatctatttcttttagcaatacaataaaaaaagatgtaattaccttcatcccggcagtaaaatgttttcaaatgagttctaatgtaaaagttgtggaaggacctggtcatacaggagggaatttaataagattgcaaggcaatatgatgttcggtattacatttgctgatgatttgaatcaactttacagaatacgtattcgttatgccagcgacacgaacttgaggctttcactcggtatgatatctacccaagctatcaatattggtagaacttttttcaatttaagttctaataatttacagtatgaacattttgaatatgctacatttcaaacagtaattgtaccttcacctggggcaaatcaattagtacttttagaaggttttaacgatagcaatattaatttatatatagacagaatcgaatttattccagtaacgcaacaatacttagaaacaagtgaaagagaaaaagtagaaacgattcaacaaaaaatgaatgatgtgtttttagatcctcaacatcaatttttacaaacaaaaacaacagattatgagattgatcaaatcgcaagtgacatagaaacaatatcagaagaatggtatccacaagaaaaaatgatgttattagatgaaattaaatctgctaaacaacgtagtcaatctcggaatgtactagaaaatggaggttttgaaaattggatggggtggacaacaaacaatgatagtacgctccaaacaggaaatcccatctttaaagggaatgctcttcatataccaggggcaagaacaaccgaaatcaataatacaatatttccaacgtacgtgtaccaaaaaataaacgaatcaaaattaaaaccgtacacacgttatctcgttcgaggatttattgaaagtagtaaaaacttagaagtatctattaccagatataatcaagaagttcgtaccatgatgaatgtaccaaatgatctagattctatgtattccacgattaacaatccatatctagttacagattcgtatttgccatcctcccaaatagctacttattcatgtaattgtgacccgaattcaaaagtagaaggatttattgaaagtagtaaaaacttagaagtatctattaccagatataatcaagaagttcgtaccatgatgaatgtaccaaatgatctagatcctatgtattcttatgaacaaagcaacgcgaacttatcaatgattaacaatccaggtttagtaacagattcgtattcgccatccacccaaatagctacttattcatgtaattgtgacccaaattcaaaagtagtagcttgtgaagatccacatgccttttcttttcatattgatacaggaaatatagacttgtctaccaatccaggtattacaattgcttttcgtatttctgttccagatggatacgctactttaggaaatctagaagtcatagaagaccaaccattgacagaagagaatcgtaaatatgtgagagaaaaagaagaacaatggaatcaaactaaagaaaaacaacaaaaagaaacagaacaaatctattcgcaagcccaacaaacgatcaataccttatttataaataaccaaactttacaatttgaaacaacattatcagatattaaggcagctgacaatcttatcaaagatattccttatgtatacaacgatagattcccaaatgaacctggtattaattatgatggaatgatgaatttaaaacatcagatttcacaagcatatgctttgtatgaacaacggaatctaatacaaaatggttcttttacaaatggtcttaccgattggcagacatcgtcagatgctactatacaacaaatggatacgacatccgttcttatgcttccaaactggagtacccacgtttcccaacaaatccaagtacagccaaaccatcggtatctcgtacgtgttcttgcgaaaaaagaaggaaacggaacaggaacgatcaagattagtgattgtacaaatcaaatcaaaaccttagaatttcatacttctgatcatacaaatcaaactatgtgggaaacgaatccaggatatgtactcaaaacaatggttttcatcccccataccaatcaagtccgtgtagatataggagaaacagaaggaaccttctacgtccaaagtatcgaatttatttgtaccaatcaataa

SEQ ID NO: 165 - DNA, 2013 bp, Artificial sequence
  Synthetic polynucleotide or polypeptide
atgaaaaatactaaacttgatacccaaaattctgtaagatatcctttagcaaacgatcaaaccactacattgcaaaatataaactataaagattatttaaaaatgtctgaggaacataatgctgattttcttgcaaatacgggagtgtttgttagtacacaggattcgatcaaacttggaattaatattgtgggtaaaatcctatcttctttaggagttccatttattggaccgatagttagcttctatactacaattatcgatctattatggccgtcaagtggtggaaagaatccgtgggaaatttttatggaacaagtggaagaacttattgatcaaaaaatagcagaatatgcaagaaaaaaagcactcgcagagttagaagggctaggagcgaattttgaattatatcgagtagcacttgaagaatggaaagaaaacccgaatatttctagaacctcaagagatgttcgtactcgatttgaaatccttgatggtttatttacacagtatatgccatcttttaaagtatcagatcatgaagtgccattacttacagtatatgtacaggcagcgagcctccatttacttctattaagggacgcttcgatttttggagaagaatggggattatctacagctaccattaacaactattataagcgtcaaatgaaccttactgctcaatattctgatcattgtgtaaagtggtataacacaggtttagatagattaaaaggatcggatgctacaagttggttgaaatatcatcattttcgtagagaaatgacattaatggtattagattttgtagcgttatatccaaattatgacacacatacatatccaatccaaacaacagctcaacttactcgggaaatttacacggatccaataggatataccctaacaaattcaacaggatggggtagtccttggacaaatcacagttttcacaattttactcaaattgaaaaagatgtaattcgtccaccacatgcatttagtatattaaattcagtagaaattgggacaagtaaggggggacttgctctcaatgataatgaatacattaactattggtctggacatttattagaatatacttatgcaaatgactcggaaatttataaaaaggattacggtaatcttaatacttctgaaaaaaataagtttgatttaaaggataaagatatttataaaattaattcaactacggtatgcttagctaattactatacgaaaatatacggaactacaaaaactgattttcttatggttaaaagggatagcccaactacaacaacttattcttattcaaaaacacatacagctattccatcaaacatacaaaattatgattcagaaaatgaattaccacaagaaacaattgatgaaccaaattatcaagcatataatcataggttagctcatatcactacttaccctttttggaacgtaggtagttctagtagtcagtctgggtacttacctgtatttgtttggacacatcggagtgtagatctcaataactttattgattcaaaaaaaatcacacaaattccagcagtaaaaagtatagaaagtgcaatgaatcattactctataagtattgaaaagtgttctggatatacaggtggagatgtggtggttaataataacacttacaatggaggaagggtagcttattttcacgctaaggcagcagaaaatgcattatctcaaaaatatcgtgttagagttcgatatgtgtcagaattagctggcgaactaatcgcaatgataagaaagattagtaatgattgggaacaacaaataactagaaccaaagttatacagacaaaggacctgaaagaaaatttgacatataaaagttttcaatatgctgaatttgatacattagtatcacccttagaacctaactttgttgtagaaattataacgagtgatatgaaaggttttgatgaaaatatatatattgataaaattgaatttattccagttttcgaataa

SEQ ID NO: 166 - DNA, 3447 bp, Artificial sequence
  Synthetic polynucleotide or polypeptide
atgggaggaacaaatatgagtccgaaatttcagaatcgttcagattgttcaagttgttcagatgactatgaaatcataaatgctccatcaagtacttctccaagatatcctttagtaaacgatcctactacacaattccaaaatatgaattataaagagtatttacgtatgacaggtggaaatgcgattattagccctacctcagtaagatcaggtggggaagctgttcataatatactcactatgactggaattatactaggtgttacaggtcatccaattggaagtgcaatggttaaaacattggatctaatacttggcatattatggccatcaggtgagaatgatataagtgtatggggtggtctcttaaatgcagcagaagagcttgttaatcaagcagtaacagaagcaatactagaagatgcagcttctgctttatcagaaatgtatagagttacagatgattatcagcgtgcgttagctgattggacttcaggaacacgtgtagatcaagcgtatatgagagggaaatttgaaaatgcgaaagatacattaaatggtaagattgcatattttaataaacctggctatgaattaccgctattaacaatgtatgcacaagccgcaaacttgtatttatatgtagtgaaagacattacaatttttggagaagaatggggatattctcgcacgggtgatccaggagttagtgggcaaggaactcttgactatatttataatgacgaattcttatattacatgcctgaacatattgattattgcacgaaatggtataatgaagggttaaataggttaccaaaatcaaatatttacgattgggttgattataatcgataccgtagagaaatgacaattatggtattagatgtcatttctctgtttccaaattttgatggatttgtatatcctttggaaaccaatgtagagcttacgagagaagtttatactgatataatgcaatatatcggctgggagtcagaactatatctttcattttcagacttagaaaattctttgattcgtcaaccgcatttagtggattttataatttccattgattggtattatagtagttcttactggtccggtcatataatacaatataaaaacacacagtctagtgttgtgaattccgctacttatggttatttagaatttcatgattactattcaccaattgtttttggagattctgatatttatcaaacggcagcagcagcatgttctataagtataggagggagtccaacttcaaagaattatggtggagttgcaaataccactttttatcaaataaatgggaatgaatcaaaattggatagtggaccttgtttctataatgaagcaagatataattcagttaatgaattacccccagaagaaaatgatgtaccactgtctcaaggttatagtcataggttatgtcatgtaactatagatgcaaagcgtgaacattcagttatttattcttggacacataaaagcgtaagtcgggataatcgaatttatgcagataaaattacccaaattccaatagtaaaagcatttgatttatatctaggcagtgttaaaaaggggcctggatttataggaggagacttagtttatcttcctcagggttctaatgttagtatgcttgttaaagtagacttattaggacaaaaatatcaggtaagagttcattatgcttcaaatacggcaaataatgcattattgttgactcacggacttagttatagtgaggcttatatggaaaagactacagatataacagacccttctcaatttacatttaattcatttaaatatgacactttcactagagatgtgacattcaatctcactgacgattatatttatttagaggcgatgcaaggaaacatctatatcaacaaaatcgaattgatcccagtgagtgaaacatatgaagcggaaagaagtttagaagaggcaaaaaaggcagtgaatgccttgttcacaaatacaaaagaagaattaaaaagagaagtgacagattatcaaattgatcgagcatcgaatttaatagaatgtgtgtcagatgaattgtacggaaacgataaacgcctgttatttgaagcagtaaaaaccgcaaaacgattgagtcaatctcgtaatctacttcaagatttaagttttgataggataaataccagtggaaacggagaaaatggctgggtgggaagtacaggaatacaagttgtagaaggagatgcgttatttaaaaatcgctctctacgtttaccaagtgcgagacaaattgatacagaaatatatccaacgtatctgtatcaaaaaatagaggagtccaaattaaaaccatatacccgctataaagtaagaggttttgtgaaaaatagtaaagatttggagttatatttgatgcgatatggcgcaaaacataaagtgttaaacgtttcaaatgatttgactctgaatcctatccctgtgaatgcttgcggagacgtagatcgatgtgcgcaacaacaagcagtcaatacgcgtttacaaccagcaaccatttcaccgtgtgagggtggagatacaaatacttccgcacatgcattttcattctcgattgatacaggtgctattgatacaagtgaaaaaccaggaattggcgtggcgtttaaaattgcgacaccagaaggttatgcatcattaggaaatctagaagtgatagaagaaggtccacttacaggagaagcgttagcacgtgtaaaacaacaagaacgacaatggaaagacaagataacgaaaaaacgtgcggaaacagaaaccatttatacaagagcgaaacaagcaattaataatttgttcgcagattaccaagatcaacaattaaagcatgatgtagagattccaaatattattgcggcagaccgaattgtacagtctattcatgatgtatataatgagtggatccctgagattccagggatgaattatgatatatttacagaactatcaaatagaattcaacaagcatatcgtttatatgatgctcggaatatcatcaaaaatggagacttccgaaacggattaacaaattggaatgcaacgcctggtgcaagagtacaacaaatgaacgggaatccagtactagtcattccaaattgggatacgcaagtttcccaaagtgttcctgtagaaccaaatcatagatatctgttacgtgtaacggcacaaaaattgggtgccggaaacggatatgttacggtaacagatggtacgaatcatacagaaacattgacatttgatagatgtgatacgaatacaactggatccaatcgatatgtaaccaaaacaatcgaatttacaccacgtacaaatcaactacaagttgaactgggtgaaacagaaggaacattcaacatagaaagtgtgaatttactcggttgttag

SEQ ID NO: 167 - DNA, 2037 bp, Artificial sequence
  Synthetic polynucleotide or polypeptide
atgggaggaatagatatgaattcatttcaaaataaaaatgaatatgaaatattaaatgctccatcgagtatttctagtatatctaataattattctaaatatccattagcaaatactctaaatcaaactatgcaaaacaccaattacaaagattggactaatatgtgtgcaattgataataatctaaaatctataaatccttttgaagctaatcttcaaaatagtttagtaggtctttttgctataactgctgctattgcttcattgttgtcagctccaataactggtggtacatctatagcagctggcacagctatagcagcagctataatacctatactttggccttctcaagaaaataatcttcccgataaacttctagctatttcagaagcaaccctttattcatttcaagatcaaagggttagagaagatgcacttacgcgattagaaagtttaaaagatagtgtaaaacatttcgaaaatgccttcacattttggataaataatcctaattcaaccaacacaactactgtcagagacagattccaagaggttaatagtagatttgtaggcagcatggccttctttagagcaaagaactatgaaccaatactgttatcaacttatgcacaagctgcaaggttacatttacttcatttacgggatggaattacgtatgctgaaaaatggaatttaagtagacaagtggatgacatgcacggggatttactttacgaagaatttaacaaatattgcaatgaatatattgagcattgtataaagtggtacaatgaaagtttgtctcttcttaaaagtgtaggtgcaaattggctagaatacaatcaatatcgtacattcttaacagcctctgtattagatgtcatttctcttttttcatcatatgacccacgtttatataaagaaagattaagtgtcgagattctcacaagaaaattatatacagatccaattaattatcatagaggcatttcactagaagcagatgaaagcaaatatacacttgagccaactttgtttactcaactatatacactaacattttatagtaatatatattataattacatgggacacaccaatacttatagatatttatcatcggacaaaatttttgcagagcgttcttttggaaaacaaagcagctatatagataaagtccctgtaattcctaacgataaatcaattatttataaaattcgagcatatgataatcataatggtttatttaatgtaatgtactttggtttttgggacggagaaaaagatcaaatacaaaaaattattggaggtagttctacagaaatatacagaaatgaagtttatgtaactgggaatccaaaagaaggttatataccaaataatttcgattcattaaactttaaaaattgtactcatcgcttagcagatgtcatctcacatgatcttgatgaaaaaaacaaatgttattcttttgcatggacatctactacaatttctcttgaaaatggaataaaaaatgatattatcacacaaatccctgctgtaaaagcctatcaattaggtgtgcaatcacaagtgattaaaggtccaggtcatactggtggagacttaataaatttaaaatcaaatgattatttacgtatatcatgtcaacacttatctaatgttacaaaaaaatattttgtaagaattcgctacgctacaaatggttctctaaatactaggcccattataaatattacaattccaggaatgacaccacaaggtatggtactcgacaatactttttctggtacaggttatagcaatttagaatatcaaaattttggctataaagaatttctaaaagaggtaacattaaatccaaatcaaagtatatctcttacattaaatcgttctgatcaaaattcaaattcaattttactccttgatagaattgaatttctaccaattactccctctatacgaaaaagtaaagaacaacaaaatttagaaaaaaatcagaaaacggtaaacaagttatttttcaattaa

SEQ ID NO: 168 - DNA, 879 bp, Artificial sequence
  Synthetic polynucleotide or polypeptide
atgaaaagaaaagtaatattgtgtggagtactaactagcactctattaggtggtttcaatttttctaatactgcaagtgctgcagaaactcaaggaaatataagtaatgttttaaacaaccagaatagtaagcaacagaacgctattcaagatattgatgaaaaaatagacaatatgattgcttctattccttccccttttatgccttgggtgcgtacaacacatatttttggagagagtgttgcttactcaggaataaatatacaaagtaataatgttacaaacattgaacctatatattttggaggtaatacatttaataataacacccctgtgacacaaacgtatcgtactactgagtttactgaatcagttactaaaacaacttctactcaagtacagaatggatttaaaactggcataactgcagaaggaaaagttggtataccttttgtagcagaaggtaaaataacaaccaacctcgaatataatttttcacacacaaatgaaaatactcaaagtaaaaccaacactcttactgctacggcacaagaggttattgtccccccaggtaaaacttataaagcagaggtttattttgaaaagaaaagaacttcaggtactgtagaactacatgcagatgttcttacaggtgctaaatcaggaggaacggtaacttcaataggtagagcattaggacaagcaacgaataaacatggattaattcaaagtcctgataattcagataaagttcgtgtaattggaactggaaattttactactgaatatggtacagattttctcgtgaaaacgtatgatataacagcaggtgaaaaatcagctaaattggtaaatactaaaagaatgtctttaaaataa

SEQ ID NO: 169 - DNA, 2484 bp, Artificial sequence
  Synthetic polynucleotide or polypeptide
atggaaataaaagtaagtctactgctcgaaattacatgtatctcgactgtaccccttattaatttaaaatggggagattatatgactaagaactgcaagaaaatattatctatgacattagctacaagtatgattgctggaacttacattccaactgcttatacagcatttgcagaaacagaacaaaaagaaggttcacaagaaaatcaaacaagcactataaacaatgataaccttccgttcaattcatatgcttggttcaataacccttatacaggagtaacttttgaacaattcataaatgcatttaataacaacgcgtggaaccctttattagctgatattaaaaacaaagggcacgttggttcgggtacgcttactttgttaaaaggtataatgggaactggtttatcattattgccagcgccagctagtctgttaggcagtgtttggaatgtatttatgccgactactactcctaacgaaacagatatgtggaagcaattagaaacatatattgagcaaaaaatagatggaaaaataaaagagtatcataaatatcttatgggcgctgaatttaatggggcaatgacagcaataaaagagtatcaacgtgttttacaaatttataatgatagtagacatagtttaaaaaaagcagaagagcctggcacaccagtaattgaagcggccagagcggcagatagagagttgaaaaaatttattgctattattcaaacacctgaaaataaaactgactctgtatatcaacaaataacagctccaatatttgtgcaagctgcaaatgctcatctcttattacaaagagatattattttatatggtaatgaatggggaatagataaaaatcagtggcaaggatataaagatgaccaaaaaaaactgattcaagactatacaaaatatgctatgaatgtatacaatgccggattagaaaaaagaaaaagagaagctgagcagattaatacccttgaaaaatatcgaaataccgataggtggaatcatattaatgaatatgtaagagaatatacattaagtgttttagattttgtggaattgttcccatatacagaccctagtaaatattctcgaggtaccattcagaacaattctagacaagtatattccgatattggcgggaaagttcaaccaaaagaaagaacttggcaagatatccaaaaaatcatggattctcaagaatataaaggggatttaaaaggactcgacatacgatcgggggatcgaattgatgctattaggtcacattactcagagcgtttgtttgatggtccaggatggcccaatacgggatggattggaaatgcgaatggaggaaacttaaaagaaattaaattctatgatgatcccttaaccaaagttacagtaggatcagaaatcacgcctttttatctacacttggaccatgagagcgggaagacgtaccctcgatttggttcaaccctttctggaaagggaacggaatctacttttgaatatcctggtcaaaaggtttcccttgttcatgcatttaatagaagtactcagcctggatttgatggtattgacgcaatagtattcggatttagtaataaaaatcttagtcttaatcatcaattggcgacaaatatgataacaacaatacccgctgaaatgtataatttaggaagtgattttaaaactcaaattgagccgatacatgcccaacaaaaagcaatgaaaacagatactcttaattcctatttaagatatgatgtaaaggctcctaaaacacaaaaatataaaattaaatacagggtttcagctaatgagtattctaaaatccgacttttatacaataataaccttgttgaggagacttctatttctgctataggtgatgctgcagatacaataaaaggagaatatggttattataagactatagaaggaccaacagttgagataaaaggaggatccagcccaaacctactaaaaattgaaaatgggaaaggaaaattttccttagatcacattgaattagaaccactggaacctgatgaagtgattgcacaagataacttcgatgatcgaaggttaaattggactaatctaggtagcattgtagcaggaggcatcacaggtaaagctggtaaaattggtgcaaatggagatacttggacagagattaatgatcaattagtagcaaattctagatatacccttagtatgaaagtgaaattaaactccaatgatgcaaatgtacgacaaaagataacggtatttacagataataagaaccataaaagaataacaaaaacagtcgagctgaaaggtggagcagggtaccaagagatgaaactagaatttgctactgctacaagtgctaatttaataggtctaggtactcatgttgggattcagacttccggtggaacatctgaggtattatttgatgatgttaaaattattggtgcaaaaaaataa

SEQ ID NO: 170 - DNA, 3501 bp, Artificial sequence
  Synthetic polynucleotide or polypeptide
atgaattcaaatcatcataataagtatgagattattgattcaaattattccctttatccacctaatagaaatgggaataattttagatatccgtatagaaataatcccaatcaaccagtccaaaacaacaattacaaagattggttaaataactgtcaaggaaatcaaacctatgatggtaatcatgaaagttttgctagtgctgaaaccattgctgcacttagcgcaagtattatcgtaacaggaacattattaagtactaccggaggtggagcaatacctggagctatactaataagtattggaactctattaccaattttttgggggcctgattctaatcaaaataatataacaacatggaaaggacttttgactattggaaacagagtttataacgaagacatagatgaggcaatattaactaccgtatctagattaacacttggtataaaacaaaacatgatagactttgaaacccattttaataaatggaaaaataatcgtaatcatgctacagctagagaagtaaatagtcgttttgattatatacatcaaactttgataaataatttaggtcaaataacagaaccaacatataaaataccagcacttcctgtttatgcaaatttagcacttatacacttaactttattacaatatgcagttcaatattataatgaatggcttcaagatcaaggaattcaacctaatcctagttcttcctctaatttctataaaacagaattacaaaagaatatacaagaatacactaattattgtaatgatacttataaagagggtttagttaaaatcaaaatattaaaaaatgtatactggaatttgtataatgcttatcggagagaaataaccctaacggtattaaatattatttcaactttttcatattttaatgtagataactatccaatagactttaaaggtgaaattacaaacgaagtatattcagatgcagaagtaagttcagattcaaattttaatctttctctacaagacagtgcattcacaagagaacctcatttagttactattttatcaaggctctctttatctccaggaaaccaacaattcgatcaacaaaatgatttattattatctgttactaatacttgtcattatataaataatcctacaaatcagatcattacccaatattatccatcagatagaaaaaatcatattgattatgaaagaacgtttaacttagaactaaaaaatcaacaaataaatatgataaaatatgaaattcacgcgagcaatgaattccctgatatcttttctataatttttcacatgaaaaaccctacacaaactgctatttttaaaccagcagaaacactacctgttcctacaatcaccaaaacattagtatttcccgaagaaaaaataaataaccaatatactagaccttcttatatattatcttatattaaaataagtaacgaaaattatttttatcaaggaggtacacaaacatgttttgcttggacaccttctatgattgatgttaataatacaattcaaaaaaatataataacttcaatcccagctgtaaaatcttccagtataagtactgattcaaaagtagaagaaggacctggacatactggaggagatttagtactactaaaaaataatatggaactacgagttacatttccttctgtaacacaatcttataaaatacgtattcgctacgcatccaatgtaaacataaacattacaattagaatatccaatcaattatcaaggacaacaattttaagaagtttctttaataacaattcttctagtttattatatgaacaattcagatatcaagaattcccaactgtattttcacctaaacctggaaacatagagtcgatatttttagaaactacagcagattttgctcaacttatatatatagacaaagttgaattcatcccaattactccacaatatttagaaataactgaaaaagaaaaagtagaaaaccttcaacaagaaatcaacaacatggttatcgattcacaaaaacaatttctaaaattagaaaccacagattataaaattgaccaaatagcaaatgacatagaaacggtatcagaagaatggtatccacaacaaaaaatgatattattggatcaaattaaacatgccaaacaacagagtcaatcccgaaacttacttaaaaatggagaatttgaaaattggatgggttggacaacaaacaatgatagtacgatccaaacaggaaatcccatctttaaagggaatgcacttcatattccaggggcaagaacaacagaaatcaacaatacagtatttccaacgtatgtatatcaaaaaatagatgaatctaaattaaaaccgtatacacgttatctagttcgtggatttatcgaaagcagtaaaaacttagaagtatctatcatcagatataaccaagaagttcatacaataatgaatataaaaaatgatctagatcctatgtattcctatgaacaaaataaagataacctatcaactattaacaattcgtacccagtaacagaaccgtatttgtcatcctcccaaatatctactcattcatgtaattttgacccgaattcaaaatcagttacttgtgaagatccacatgctttttctttttatatcgatacaggaaatatagactggtctaccaatccaggtattacaatcgtttttcgtatttctgacccagttggatacgcaaccgtaggaaatctagaatttatagaagaccaaccattgacagaagaggatcgtaaatatgtgagagaaaaagaagaacactggaatcaaacaaaagaaaaacaaaaaaaagaaaccgaacaaatctatttacaagcccaacaagcagtcaacaatttatttataaataaccaaacattacaatttgaaacaacattatcagatattaggataactgacagtcttatcaagacgattccctatgtatacaatgatgtactaccaaatgaatctggtctcaattatgatttaatgatgaatttaaaaaatcagatttcacaagcatatactttgtatgaacaacgaaatctaatacacaatggttcatttttagatggtcttaccaattggcaggcatcaccagatgctaatgtacaagaaatggatacaacatccgttctcgttcttccaaattggagtacccaagtttcccaacaaatccaagtacaagcaaaccatcgttatttcatacgtgtttttgggaaaaaagaaggaaacggaataggtacaatcaaaatcagcgattgtggaaatcaaatgaaaaccttaacatttcaagcgtctgatgataccaatcaagctatgagggaaagtaatacaggatatgtaattaaaaccatggttattaccccccataccaatcaagtccgtatcgatatacaagaaacagaaggaaccttctaccttcaaagtattgaatttatttgtaccaatcaataa

SEQ ID NO: 171 - DNA, 3655 bp, Artificial sequence
  Synthetic polynucleotide or polypeptide
atgaaccaaaataacaacaagaatgaatatgaaatattggatagtggaaatttgtcttatcaaccaaggtatccattagcgaatgttccaggttatgaactgcaaaatatgggttataaagaatggagggatatgtgtccagatgcaaaacgacagcttctcggaccgataggaatcagcccatatgatgatatggaaacgctgggaaaagtcttaacgctaacgacggggatgattgctgcaatagcaggtgtggcttctgttgcatttccaccattagcaatcgtgtcaggcgcattcgcacttatgtctatgtttttagatgtgttgtggccagaatctgattcgcaagtcgtatgggggcagttcgccgctgcagcagaagaactggtaggtcgtaaaatttcagatgagataaaaaagtcggccgatattcaattaagaattgtacagtcaagattaaatgattatcaacaagcagcctgtaatttacaaagcgatcctaacaacgaagtgtataaggagttaataagagacgcatttgatgatgctgatgatgcattgaaagacaccatgaaaatctttagtagagaaggttatgaactcctactgctattaaattacgtgcaggcagccaatcttcatttacttttgttaaaggatgttgtacgttttggagttggttggggatttccacagcaaagggtggaccaatattattcgaatccgacaaacctaggtagcccaggcatggtacaattattagcagaatacacaaaccatagtacctcttttttttggcaaggggtaagggagaaagaagaacagacaaggtcttactattcggctcaggatgattacgatggttatcgtagcgatatgacgatgatggtgttagatatgattgcactttggccaacatatgatccacgtaggtatccatatgctacaccagtacaactcacgcgaaatatatattcaactgtaattggtgctgaacttaatcaaacggcgaatgtgtggcatatgcctatagagcgcacatgggatacgcctcctagcttagttcggtggatccaggaattcactggttatacgtgggagaatgtctcaagtcttgctcaatacgctgggacaaaaataggctatgagtacacttggggcgggggtattttttgggaaagtagaggaatagttccacctaatggaagagtttgggaaactggtagcctacgggctaattttgtaaaagctacgcgccaaggtggcggtgtttatcctaaatatgaattagctatattgagcatgcttttccacagtcctactacctccccaagctatttcacgtttggaaacggctcatatcaaagctcctacttggagacttattatgcgcctccgtgtgaaaatcaagctataaacgcgagcaatcctgatgtttgtacgccaaatgaatggttgaatgctcctactggggcttgtctttcagacgacaaatatagtcatacgttagcggacgttatcccagggtattcgattatagaccgtagtgtagcagatataccatttataaatacttttgcttttgcttggcggtctagattgtgcaagccacacaatctgatagaaccaaacaagattggccaattccccgcagttaaggccagttggttaagctttggtgctagcgtggtaaggagttctggtaatacagggggggatttagtaagactcaatggtgcagcagtacttaaaatgcatgtgcaattcttagaacgtcgcgtatatatcatacgattacgttatgcaactgttgcagatgatctcggtttaaatgttgttgtagaaagcgatgggcatagatatgctgatactacattattccggctcaatccaacatcaaataattcgacaacgcagtggaaatttgaagattatggatatcaagttgtgggtagtttatatccaaaccgagacttggggttggtgtacgcggtttcggtgtctccccagggtgccttagatagccatatggacatcgacaaaattgaattcattccaatagaagaatctttggaggaatatctagcaaatcaagatatagaaaaggcaagaaaggccgtgaatgccttgtttacaagtgatacgaaaaatgctctaaaattgaacatcacagattacgcagtggatcaagctgccaatttggtagaatgtgtatcggaggaattctatgctcaagaaaaaatgatcctactggatcaagtgaaatttgcaaaacgactcagtcaaacacgaaatctattaaactatggagattttgaatcaccagagtggtcaagagagaatggatggaaaacaagtagccatgtctctgtcagagaggataatccaatctttaaagggcgttacctccgtatgccaggtgcgaattattctcgttttgataataaggtatttcctacgtatgtatatcaaaagatagatgaatcgaaattaaaaccgtatacacggtaccttgtacgtgggtttgtaggaaatagtaaagacctagaattgctggtagaacgatatggaaaagacgtacaagtcgagatggatgtgccaaatgacatccagtacgatttaccaatgaatgaatgtggtggctttgatcgatgcaaaccagcagcctatcaagcaagacctcctcatacgtgcacatgtaaggataccacttccgtgcatacagactgtcagtgtcagaacaaagtgaatcgtacttccgttgatgtgtataccaatggatcgccaagtcgtgacatgtatgcggacggattccattctcacaaatcttgcggatgcaagaacaatgacatgtatcagaacggaaccgattcgcataagtcttgtggatgcaaagacccacatgtctttacgtaccatattgacacaggatgtgtggatcaagaagaaaacttaggtctaatctttgctttgaaaattgcaagtgaaaatggtgtcgcgaacattgataacctggaaatcatcgaagtacagccattaacaggtgaagcgttagcgcgtgtgaaaaaacgcgaacagaaatggaaacaagaaatgacaaagaaacgtttagaaacagagaaagccgtacaagcagcgcaaagtgcgattcagaatctgttcataaatgcgcagcaaaaccgtctgaaatttgaaacgctgttccctcaaattgtcaatgcggagatgctggtacaacagattccctatgtgtatcatccattcttaagcggggcacttccagctgtaccaggtatgagttttgaaattgtccaacaactatcatcaacgattggaaatgcccgtgcgttatataatcaacgaaatctcgtacaaaatggtacatttcgttcaggtacaggaagctggcatgtgtcagaaggtgtagaggtgcagacactgcacaacacctccgtactcgttctatcggaatggaatcatgaagcgtcccagcagttacgtatcgatccagatcgcggatatgtgttacgtgtaacagcccgaaaagaaggggcagggaaaggcactgtgacaatgagtgactgtgcagactatacagagacactgacctttacatcttgtgactacaatacgatcggtacccaaacgatga

SEQ ID NO: 172 - DNA, 1095 bp, Artificial sequence
  Synthetic polynucleotide or polypeptide
atgaaaatgaaaaaatacaaaaaattgttaatggttgctccacttgcatgtatgttaggaacaggagttgttgctttaccaactgcatctcatgcagatgcagcaccagtagcacaagaatatgatgtatatcaacagggaagtacttactctaaagaaaacatgacaaaggttttatatatgaggttagctagtggtatagaggcttcacctgaattacgtcaaaaatttaaaatagcagatgatgaaagtgtacaaagagaaaatcctgctacgtcccttactgaccctaatggtaatactacaaattatcctgccattgattatggtttacaagatcaactgagtaaagtgactgttgcaagtactggaacaaatattacggttaatccaactacagttactgaagtagaagcaggtaaaattgagctattaagttataggaatgacacacctcttgcacaaaaacagtttacaacagaaaaacaaatgaaacgtgtagatactgttactgcgacaaaccaatatgggtttaaattaggatttgagtctaccactgaatttaaagttgatgctcttgtagcttcagctacacaagcatttaaagctagtgctgaatttaatttttcacgtacagatacaaataccattactaatgaagagactgttatatttaaggcacaagaagtacttgctgccccaggtggaacaacgaattattttacgagggttggaaaagcgaaattttcggggtcattccaaactgacgcggctttagctgagctaaaattgaaacttcctatagttaagaaagatgggaacgggcgtgatgtagttcatactgaagaagttactctaacttcacaagacatatatactattttcaaaaattgtcctataccattaccagaatatttaagttttgatgacaatggtaaaaaagtcttagtgaaaaatgcaacttttgactatacaggagaaatgggttatagtacagcggcacaagcggaatttattccattcgatcaaaatcaaccaaaacaaacaatggcatatgaaaaatatgaaacaaaaacacatgataaatctctttaa

SEQ ID NO: 173 - DNA, 891 bp, Artificial sequence
  Synthetic polynucleotide or polypeptide
atgatttttgtatgttatggcaactccactcataaattgtaccagtgtgctatcacatgttacaataaaggggaatccaaaatggcaaatccaattgatttaattgaaatttttagtatctttgctaacaactggtctatgcagaaccacggatgtgcaggaactttatttttgctgtcacgtgacccgtctcaacaaggacttcagttgttattagattctactgcaatatatgatacacctacagaaaaagtgcaaacagtttctcatagttccttttcttttcaaaatacttctagtgaatttagaaaccaacgcattttattccaaacaacaacacctctttcagagtcttggaaacttcttcaaagtgtctgtccgacggggaatagtttctttacggtttctatacccattcatacagatatccctggcatttctactgtggataccattcaaatttcgaatcaagatattcttactcgtacagccacttatacttgggatatcgatcaaatgattcatttattaccccaatcatctactaaagttacatttcaaaccaaattgattcgaaggaaacaacctttccagtttgtatatgaaataaccggtaatattggtgttacacctgtgaaccttcctggttcaacagatacatattttcctataacacaagttttacagtggtatcaaagtgatctactcactttggattttgatcagaatcacgtcacctgttccaataaaggcttgtatatggcgacatatcatgtccaaccagaattattgattcaaacacaaagtatacaaaaccctaccattgtacaagaaaccgtaattcctctccaattagaggatataacacctataactcctgatatcacatga

SEQ ID NO: 174 - DNA, 804 bp, Artificial sequence
  Synthetic polynucleotide or polypeptide
atgtttatgaatgcaaatgtaaccgatcttattgaactatttggcagatatgcgaatcaatggagtcaacaacggggaggtggaaatagtaaattatcctttatgttatcaggttttgaacatcttgcatttactagttttactaaacccataaagtacaatgagcccactatacatctgccggaagatgtagctgtcgcttctaatacttatactaatactggaaatcagccattggatgtcacaatcggattagggggaacattaaaaaactggcttcatcttaaagtaaatgaaggcaccagcgaggctggaaaacaatttattaatattgatttaccaaatgatattccttcatttttaaatgaacaattagttcctataggcggagcactccatgaaagttctcacaggcaatcttgggaagtcaaccatccatttaatattaaccctaggtttacagtgacagcaactttaatgattaaaacaaaaaaagtgacacaattatttgaaatacagagaattttatcaagatatatagctattcatacatcacaagcaataaatgggcatctgatatcactgcatcatgtgtcacgtattttaaaagattaccttagtccttatatacaggtagatggtaataaagtgactgtaacagataagggggaacttcaatctttatttggaattgagcaatatattcatattcagggtaaaagtttaagtaatccaaatataaaagaaaattataatatctataatcctgagacatctgtaaaacaaagctttaagttaagttag

SEQ ID NO: 175 - DNA, 3447 bp, Artificial sequence
  Synthetic polynucleotide or polypeptide
atgaatcaaaatgtgacaaaagcgcgaaaggctgtgaatgccttattttcaaatcctactactttacaattgaaagtcacggatcaccatgtggatcaggtggcgaaattagtagagtgtatgtctgacggtattcatccaaaagaaaaaatgtgtttgctggaccaagtgaaattggcgaaacgattgagtcgagaacgtaatttgttaaaatatggtgatttcggatcatcggagtgggctggcgcagatggatggaacatcaatcctcatgtatacacgatagctgataacccaatctttaaagatcattatctcaatatgccaagtgcaaataatcctatattaagtgataaaatatttccaacctatgcgtatcaaaagatagaagaatcgaaattaaaaccgtatacccgctatatcgtacgaggatttatagggaatagtacagatttagaagttttggtcgcaagatatgagaaagaagtgtacaaaagaatgaatgtaccaaatgatatcatcccaatgaatccatgttcaggagaacctctatcacaaccaactccgtatcctgttatgccaagtaatacgatgccaccagacatgtggtgtaatccatgtgagaatggatatccaaatgcagtagggatgatgattcaacagacaaatagggtgtgtcaagatccacatgaatttaagtttcacattgatataggcgagctggatatggaacgaaatcgaggtatttgggttggctttaaagtgggaacgacagatggtatggcaacattggataatatagaagtagtagaagcaggaccgttaacgggagatgccttaactcgtatgcaaaagcgagagccgaaatggaagaaaaaatgggccgagaaacgaatgaagattgaaacggctgtgcaaacagcacgaaatgcgattcaaacattattcacagatcaaaatcaaaacagactacaatccgctattacattgaaaaatattgtagatgcagaaaaatgggtacaaaagattccatatgtatacaatcaattcttgcaaggagctatatcaggaataccggatgaagcatatgcgtatgatattttccaacaactttccgatgccgttgcggcagcacgggcgttatatgatcagcgaaatgtattgaacaatggagatttctctgcgggattgtcgaattggaatggtacggaaggtgcagatgtacaacagattggggaggaatctgtgctcgtgatttcagactggagtgtaagtctttcccaacaggtgtgtgtgaagccagaacatagctatttattgcgtgtaacggcaagaaaagaaggttctggtgaaggacatgtgacaattaccgatggaacgaaagacaatacagagacactgaagtttatagccggtgaagagacgacaggtgcgacaatgtctatgtctactattctttcccatattcgtgaacgttataatgagcgcaatatggcgacatcagaagcctatggcacaagcgggtatgcaagcagtcaaaatatgatgatggataatcattcatctggcacgtatgaaacgaatacgtaccctaacagcacgaacatgaccaataatcagggaatgggttgtggatgccattatagcgccgatgggtatccgatggtagagcaaagtactcctgaactttctggttatgtaacgaaaacagttgaaatcttcccggatacagatcgtattcgcattgagattggcgagacagaaggaatgttcaaaatcgaaagtgtggaactgatctgtatggaacagacgaatgaaaaaaattatccagctgtagatgttcaaccgatagctacgtatatgcctacagcacaatccgattcaatttcttcacctaataataatatgcaagcaaatcagggatcggattgcggatgtggttgcagcacaaacgtattaagtacatttgcattcaacttaggtggacaatttgataatgattttcgttataaatcaataatcaagccccttccacaaaacgcgtcaaatatagagttagagtatgctcctgtgtatgactacgacacagacgggtgttatgcgactgccgcaatttctccagatggcacgactaactctggcctaggtatgggcgctaccccgagcagtaactgtagaggtcttccacaactagaaaattcaaacacttattctcgggccaaatcaaataatggttggactgcaattatgtatgcgagttactttgagaaagatcaaacatctctcggccctggttcggctggacatcgacatgattgggaacacacaatagtttgggttaaagatggtcaggttcaatatgtaacttattcagcacatggtaactggtacactaatcctcgctcaaacgtcagatttagtggaaaccacccgaaaattgtataccataaagacggcatttcgacacatgcttttcgcctggctaatagcaatgacgagccgccagaaaacatttatcaccagtggctccttctaccaatggttggttggaatggctatccaagcctagctattcgagaaaaactaatgactacgaactttggatctgcaacacttgagatcaaagatggaaattttgaaagagcccttgatagagcaaagccacccattaactttgacccttacgcactggacctgcaagatggtggtgcttatcaaatagtttctactttaaataatagtagtgtcgttgacttaaatcaagcagatggaaatgttctgttgtggcaaaataacaacgctaataatcaaaaatggaagctagtatatgattcaaataaaaatgcatatcaatttaaaagtgtaacaaatgaaaatctagtattaacttggaataattttaatggttctattaatgtagttgctacatctaatcaaaataaggaagagcaatattggataccaacagatgcagggaatagatattattatataaggaataagaaggatccaaacaaagtgttagatgtgagtgattctggtactgcaaatggaacaaatgttacagtatataatttccatggtggtaataatcaaaaattcaaattgtctaatgtaacaggaaatttaacaacagaggtatattcactctatcgtgcgctacctggtcaaagcagcagatcaagtattaatttttcacttgaacagcttgcggcaggtaccaaagtacgagttgttttagaaggagaaggtgctacctctttgttatttaacgtttcaagagataaatcaggtgcagactctagaatttggtcaaatgttagagatggttctattctaacgatcccttcaggagatgatagaaagaatttgtatatctcaggtcctcctagcggatatacttctaacggtacatttaaagtgaaattctacgctcttccaaactaa

SEQ ID NO: 176 - DNA, 2010 bp, Artificial sequence
  Synthetic polynucleotide or polypeptide
atgaatcaagatgttacaagagcacgagaggtagtcaatgccttgttcttgaacaatacgttacaatcgaaagtcacggattatcagatagatcaggccgcacagttagtggaatttatatctgataagatttattcaaaagaaaagatgtgtttgctggatcaagtgaaaatggcaaaacgactcagtcaaacgcggaatctattaaactatggtggttttgaatcctctgattggtctggcgtagatggatggaacataagcgcccatgtatacgcggtagccgataatccaacctttaaaggacagtatctgaatttaccaagcgcgaataatccgcagtttagtgacaagatattcccatcgtatgcatatcaaaagatagatgaatcaaagttaaaaccctatacaagatatatggtacgaggatttgtcgggaatagtaaagatttagaactgttggtcgcaagatatgataaagaagtacacaagaaaatgaatgtaccatatgatatcataccaacggattcatgcacgggaggatatctattggaacaaggctcttatccagttcgaacaaaccagatgatgccacaaaacatgtcatgtgatccatgtgataatggatacagaaatgaaagcggaatgatggttccaaatacaaggatgatgtgtcaagagccacatacatttaagtgtcatattgatataggcgaactggatatggatcgaaatctgggcatttgggttggttttaaaattggaacgacagatggtatggcgacattagataatctggaagtagtagaagtaggtccgttaacgggagaagcattagtccgtatgcaaaaacgagaaccaaaatggaaaaagaaatggatagaaaaacggatgaagatcgaaaaggctgtgcaaacagcccgaggtgcgatacaagcgttatttacagattccaatcaaaatcgcttgaaaccggatatcaccctgcataatattttacaagcagagaaatgggtacagaagatcccatatgtatataaccaattcttactaggggctttaccatcagtaccaggtgaaacatatgacatcttccaaaaactatctgatgcagttgcgctagcacaatcgttatatggacagcggaatgtgctgaacaatggtgatttctcagcgggactgtcgaattggaatgccacagatggtgcggatgtacaacaaattgggaatgcatctgtactggtgatttcagattggagcgccaatctttcacaagacgtgtgtgtgaatccagaacatggttatatcctacgtgtcacagcgaaaaaagaaggatctggagacggatacgtgacaatcagtgatggtacgaaagacaatacagaaacattgaagtttacagtgggtgaagagggaacaagttcggtaacgtctactattctttccaacctgcgtgaacgctataatgaacagaatgtgacgaatgcctctgaagaagcctatggaacaaatggatatgcgagtaatccgatgacgaactacccatcagataattatggagcaaatgcctaccctggaaataacaataggaattaccaatcagagagttttggaatcacgccatacagcgatgaaaatccgatgacgggttatccatctaacaattatgagatgaatgcctatccgggtagcacaaacatgacaaatccgaatggggactgcagctgtggttgtggcacaaacgcatatgctggtgaaaatacgacgatgaatgattcatccaattataatggagtaagttacggatgtggttgtcgcacatatacaaacaaaagaacggatttgtatgagtctcctatgacagaacaaagcggttcttctctttctggttatgtcacgaaaacggttgaaatcttcccagaaacaaatcgtgtctgcattgacatcggagaaacatctggaatatttatggtggaaagtatagagctgattcgaatggattgcgaatga

SEQ ID NO: 177 - DNA, 2448 bp, Artificial sequence
  Synthetic polynucleotide or polypeptide
atgggaggattgttgatgaatcaaaattataacaacaatgaatatgaaattttggataatggtgttaagtgctgttcaccaagatatcctcttgcgcaggcaccaggttctgaactacaaagtatgaattataaagatgtgatgaacacgagtgtcggaagagaataccaggcagtacaacaggtaaacgtgggagaggctgttagtgcagcattaggcattctgacaactattcttaaggcagtcaacccaacattggggacagcagcaggggttattagcacgatttttggatttctctggaaacgatatggaacagaccctcaagcccaatggaaacagttcatggaggcagtagaatatctggtgagtcaaaaaattacagacgcagtacgaagtaaagcagtttcggaattagagggcgtacaacgagctgtggaactttatcaggaagctgctaatgcttggaacatgaatcaggatgatgcagctgccaaagagagaataagaagacaatatacctctacaaatacattgattgaatacgcaatgccatcatttcgagtggctggttttgaggtaccgttattaacggtgtatgcgcaagctgctaaccttcatttactactattacgagatgcggttaagtttggagcaggatggggtttttctcctacagaagttgaggataattatactagactccaagcacgtacagcagaatatacaaatcattgtacaaatacctatgataaaggtttaaagcaagcttacgacttagcaccgaatccaacagattacaataagtacccctatctaaatccatattctaaagatccgatttacggtaaatattatacagctccagttgattggaatctatttaatgacttccgaagagatatgactctgatggtgctagacattgtggcagtttggccaacctataatccaagactctataacaatccgtatggtgtgcaaatacagctttcaagagaagtttatagcacggtatatggaagaggttactctgataattcaacagttgatgccattgaatctacccttgttagacctccgcatttagttacagaactaaccaatcttacatttgatgaacgtaatttatatgaagcggaaacagtgcctgttgcgtttaaaggggttacaaatacgctgcgtcatgtaggaagctcaaccacatgggggcaaagtttttctacttctatgggatcacttaagactgttcataatgtcttggctaccgatataggtaatctttcactaagtctaggagctgtgcctttggggttttctttctataatgaaaataatacacctataaatacagttggctactctggaggctggtggaatgggatacctagagccggggatagtaatcaaaacagtcatcatctgtcatatgttgcagccctaagaacgtatagtacagctggttggtggccttatacgtatccggtggatttgttaggagaatggggatttggttggctgcataatagtttaacaccagaaaatagaattgtatcggataaaacgactcaaattccagctgtgaaaggaaatgccgtagataatggtgcttcagttgtaagaggtcctggtagtaccggaggggatcttgtaaaactacctgcgtataatcagcaatggacccaattacgtgtaaaagtaagaccgtccgtcactgcacgagcaagagcttataaactacgcatccgatatgcaagtgaagggaatgcaaatctatttgtagggaagtatgtggatgcggcaaatagctggcgtgaaactggaaactatcctgtggatcgaacattttcagggattatgacctataacgctttcaaatacttggatgcgatcagctttgcggcaaatgaagaagaatttaaaatagagctacgttgtaatagtggtggccctatctacattgataaaatagaattcattccggtaaatccgattggagaaccaattcccgccgatacctatcaaatcattaccgctttaaataatagtagtgttatgcagcttaatcaatcaactaatgatgttgaattatggggaaataataacgctaatattcaaaaatggaggttcgtatatgattcacgtatgaatgcatatcacattaaaaatatagcaaatgaaaatttagtattaacttggctttaccctggtgttagtacgacttacagagtatgtgctactactatcgtcccaggtaaatgggagcagtattggatacctgaggatataggaggaggctattatcgtctttacacttatgacaataatgggggaacactggaggtacttaatggagaaacccaaaacggaactatatttgacatgaaaccctattatccaaattcagtaaagactagccaaaaattcaaattggtaaaattaaattaa

SEQ ID NO: 178 - DNA, 837 bp, Artificial sequence
  Synthetic polynucleotide or polypeptide
atgactaccaaaaatttaagtgatttagaaatggaaataagtaataatcagcaacaaccaagacgtttaattgctccagctttccgacatattgtattaaaagttccagctagcgaagaaagtaattataaagaaatcttccaagtagagccacggtatatcgctcaagctcttcgtttagctaatgctttccaaggcgctctagacccaactgatttaaattttaattttgaaaaggcattgcaaatcgcacaacatattccgaattcagcgattgttaagactcttaaccaaaatgtagtacagcaaactgttgaaatatcagctatgattagtcagctaaagcaaattattagagatgttttaggacttgttatttctagtcctaatttttggaattcagttgaggctgccgttactaacacctttacaaatctaaatactcaagaagatggagcgtggattttttggaagagttcatcatcttcaaacacaagttattattataacattctattttctattcaaaatgcagagacaggtgcagtgatggcggtattacctatagcatttgagatttctgttaaccttgaaaaacaaaaagtattattccttacaattagagacagcgcacgctatgagattaaattgaaggctcttactttagttcaagctttagattctttcaatgcaccaattgaagatgtatttaacgttcataactatggtccatatccaccaaataattcaagtactaataattatattctccagaatttaaaattcaaccagtcgagcaccaataatttgattgttcaagacacaacagataattaa

SEQ ID NO: 179 - DNA, 4033 bp, Artificial sequence
  Synthetic polynucleotide or polypeptide
atggggggattgttgatgaatcaaaagtatcataacaatgaatatgaagtcatggatagtggcgggatgtatcgtcaaccgagatatccttatgcgaaggcaccaggatctgaataccaacagatgaattataaagattggatgaataggtgtactagcagagaatcgggagatacattctctactgctgccgttaagggggcgattattacatcttcaggtattgcgtgggcccttcttgggcttattccaggcgtcggtcctatactatccgcagctgcaggagtaataaatgtagccgttccatatatatggccagatcaggacagctctatgcctcctagtcaggcaacacaatataagtgggacgaactaatgaatgctgctcaagaacttactgacgcagcaattgagacagaagtgaaaaatagggttcttcaagaattagtagggcttcaaaggactactaaattatatcaagatgctgcttgcgattggagcagcaacccagatgatccggaacttaaagaaactattagaacacaattcattgcttcaaatacgatatattatgatagaatgcctatttttcaacaacaaggttttcaagcagaattattatcttcatttactgaagccgctaatttgcatttacttttgttaagagacgcggttaaattcgggttagcatgggggctagaccaggtaacagttaatcgatattatcgatacctaaaagaaaatacagcagcttacacagcatattgtatctcgacatttaacaacgaattagcgagactaagtacaggaactgggggagccacttcatggaataagtataatcagtatcgtacgggtatgacaattatgtcattagatattgtggcattatggtcaacatttgatccaattttatatccactaccagtctattcacaacttacacgtgaggtatacacacaggtatatggaaatttgaaggatagctattcgctgcagacaattgaatctgaggtaattaggccgccacatctgtttacctggctgagaagatttacattcggggtcgataaagacccgtttagggatcatgattatattactcgttataaattaggttttagctatatttcttctgaaggtattacaaatggagagccaggagaagctggatggatggaaacctcatggaaaggacctagacctggaaatacaacccaggagggaactcctgggtgggccagtatatataatacatttgtgaatccagcttccattaatactgatgcttcgggattaggcttatcccgacttgtttttcgtggtaatgaggatgtctctggcttgggcttttatgctgacattggtcaaaagggtggtttaaatgcagatgcgtcaggacagtttgtaggattcccttgtattaatcgtaccgaatgtgacacttcaaaatcttgtcttgatacatgtaaacctagcagtacacctaatacaagtagtccttgtgataatcaattcagatatagtgaacggctgtcatggatgaccccatttacacgtaccagttactctggacgtgatgcttttgagactattgtctatgcatggacacacgctagtgcgcaaacatataatattatagataaaaattacatcagccaaattccagtggtaaaggcatctggtggtagcggatatagcgtaatcaaggggccaggtagtacaggaggagatcttgttagcttgacaccgaatgctcgaattgaggtaccactgtctccgcaattcgaagatttcccagtagaaactaaaccttgtcgtataagaatgcgttatgcatgtaaattacaaacgaggataaaaattggtatctttaaaaatgacgaatgggaagtacaggaggaggaaatcgttgtaccatctaccccttatcctggtgaacacgctgagttaacttacaatgcatttggatatacaaatcttacatccttaaatcttacatttccaagtaatgaactaatatatattgagagaatagattcatctgatacagaacctctcatcatcgacaaactcgaattcattccaattgaggaatctgttgaatcttttgaagcgaaagaagagttagaaaaagcatggaaggcagtgaacgccttgtttacgaatgatgggaagcatacgctgcacttgaatatcacggattatcagattgatcaggctgcaaaactcgtagagtgtatgtctgatcagatctatccaaaagaaaaaatgtgcttactcgatcatgtgaaatgtgcgaaacaactgagtcgagctcgtaatgtattatactacggtgattttgaatcctctgattggtctggtgagaatggttggaacacaagtaatcatgtgtttgtctcatccgacaatccaatctttaaaggacgttatctcaaattacctggtgcgaatcagccgcactttagtgaacaggtattcccgacatatgcgtatcaaaagatagacgaatcgagattaaaaccgtacacacgctatagaatacgaggattcattggaaacagtaaagatttagaagtattcgccacaagatatgagaaagaattccacaaaaacatgaacgtaccaaatgatatcagaccatcgaatccatgtacgggagaatatccattggaacaaggttcctatccggtggtgacaaaccaagtcatcccgcaaaacatgtcatgtggtccatgtgaagatggatcacagatgatgatgcaacaaactagtatggtgtgtgcagattcacatgaatgggcgtgtcacattgatacaggtgagctcgatatggatcagaatttaggcatatgggttggctttaaaatcggaacaacagatggtatggcaacactagataatatagaagtcgtcgaagtaggtccgttaacaggagaaggattggctcgtatgaaaaaacgcgaatacaaatggaaacaaaaagggaacgagagacgaatgaaaatcgaaaaggctgtgcaagtcgcacaacgtgcgattcaggcgttattcacaggtgcagatcaaagccaattgcaagcctctatcacattacagcagattatagacgcgaagaaatgggtacaaaaaattccgtatgtctatcattcattcttagtaggagcttccgtaccaggagaagcgtatgatatcttccaacaactttccaatgccgttgcgacagtacgagcgttatatgaacagcggaacgtgctgagaaatggagatttcaatgcaggtttatcgaactggcacgggggagagggagcgaatatacaacagattgggaatgaatctgtgctcgtcatctcggattggagtgcaaacgtttcacaaacagtaggtgtccatcccgaacgtggttatgtgttacgtgtcacagcgaaaaaagagggttctggggaaggctatgtaagaatcagtgatggtacggaagaaaatacagaaacactgaaatttatagcgggagaaggtgcaacaaattcggtaccacctatgactccgcctcgtgaatcctattatgagcaagatatgacgaactatccatcagcgcaaagaggcatggcaacactcgataatatagaagtagtcgaagtaggtccgttaacgggagaagcattcgctcgtatgaaaaaacgcgaacacaaatggaaacaaaaagggaacgagagacggataaaaatagaaaaggctgtgcaagtcgcacaacgtgcgattcaggcgttattcacacatgccgatcaaaaccaattgcaagcctctatcacattacagcagattatagacgcgaagaaatgggtacaaaaaattccgtatgtctatcattcattcttagtaggagcttccgtaccaggagaagcgtataatatcttccaacaactttccaatgtcgttgcgacagcacgagcgttatatgaacagcggaacgtgctgagaaatggagatttcaatgcaggtttatcgaactggcacgggggagagggagcga

SEQ ID NO: 180 - DNA, 951 bp, Artificial sequence
  Synthetic polynucleotide or polypeptide
atgaaaaaaagtaatacaaaggctaaaaagattctatcctttgcaatacttggagttatgggcacatcattaacaattacatcaccacattcaataagcgctgctcaaattaaacctgttcaagctatggtacaaggaaatgtttctatatctgattggcaagatccttttaaaaatgcatttgcgattattcaaaagaattctcagtattataaggactttactctaacagaagttgtaattgataaaattcatcaatcctcagtagaatcagatggctcccctgccatcattaatactagtaatttatttgtaggtaggacaattttaactaacaatacgaatcaagatcaaatactcactacaaatgaattctcaaagtatttcgaaaattctattacgaattccaccacaaatggatttaacttaggaataacagcttcttcaacatttaaaattccacttattggagagactgaaattgaagtatctactgcatatgatttttcaagcacaatggaaaaaacaaagactgaaagtcacacgtatactgctagcccgcaaaatattttagttcctgcaaattcagctgtagaagttattgtaagcttaaatacggctaaaataagtggcaatgtaaaacttctttctaaagtgagtggtcacgtattaattgaaaaaccatcaaatcagtcttattttaacttatggggattagttcttactgctgagcaatatggtgaaaagcttaaaaacttagaagctgcagatcaacttgataaaacagtctttcttgtaggaagcggtaaatactcagctgaatatggaacagagttcactgtaaatgtaagacctgttgaaaaacctaggggacttgttgctaatcctagcaaattgattaacgaaggttacacatatacagtaaaaccggaagttaaaaaagaacaataa

SEQ ID NO: 181 - DNA, 2370 bp, Artificial sequence
  Synthetic polynucleotide or polypeptide
atgaagagacggaatattaagaattttttgaaggtagttcccgctgtatttgttttaagtacttcttttctagtaacacctgtacagtcttttgctgaaaataatccaacaattcaaacgtcaccgggttcagcattacaagaagggctattaagttattattttaaagatttgaattttaaagaactttcatttatgacgaatcaacaaacaggtgatttatctactttgccaacagaagcgaatgatttgacagatggaaaggcagagaaagtgcagtctgcttattggaaggggagaattcaagttggtgaaacaggtgaatactcgtttacaacatcgacaaatcagcatgtgaaactttggattgatggaaaacaaattattaaccagtccgctgatcatcaaaaaatccaattagaaaaaaataagttgtatgaaattaaaatggagtatcaaaatgattcgcaagacaatcaaaattttgatttgaaattatattggattacaccaaataatcaaaaagaattgattcctgctaaacacttccttttacctgaaataaaggaaaattcagctcagtcaaatgttaatgaaggtaagcaaattagggttgctagatctatcgcagccaatcaacctactacgttaaatgagcctaatatagtagatacagataatgatggaataccagattctttagagctaagtggatatacagtagatgtgagaaatgggcaattattactcacgccatggcttgaaagtattcatggtagcaaaggattaaccaaatattattcatctccattcaaatggagtactgcttctgacccgtatagcgactttcaaaaagtaacgggactgattgataaacaagttaaacaagaagcaagaaatccgttagttgcggcatatccagatattgatgtagatatggagcaaatcatactctctaaaaatcaaactgtttcgttaactgatggagcatcacagagtaacactatatcaagaagtacatcaacaagtacaaccgattctatttctgcaacaattagtgcagaggtggaagcatctctactaaatattggagcaaaagtttctacttcactaacagccagtacttcttcgacggtatcaattgatgatacaacatcaaatacatccgaatctaattggtcaagaaccataggtgttaatacaggagacgcagcttattttgcatcaggaattcgatatcacaataaagggacggcaccaatctataatgcaagaccaacaaatacgttttcgttattgaataatcaatccattgcaactattaaagcaaaagaaaaccaaatcgcaaatattgttgagccagagggttattacccagctaagtcaaaatctcctattttattaaatactaaggatgattttggttctagtcttattacacttaatttagaccaattaaatcaccttgaacaagagaaaaaattaaaaatagatacagatcaagtgtcagggggaattggcagagctttatcaaatggggaagtaacagttggcggagattggtccacatatatcccccaaattgaaaaaacatctgcccggattatcttcgaagatgaacgaacaggaaaagttactgagcgacgtgtggcagcaatcgatccgcaagacccagtagaaaaaacaaaaccagaagtaacattaggagaagcattgaaattagcgtttcctgatataaccgaaaaagatggggtactttaccatgattacaagaaattatctgaaaattcagatattatattagataaagaaacagctcttaatatagcagatcaattaaaacaaatgaaagataaaaatatatataatataaagttaaacgctaaaatgaatatttttataaaagatactgtatctaaaactatggataatttagttgaaaattcaagatttggtatagtggtgaagtcatttgatacacaatctgtgatgttggatatcgatcaaaggataaaacgtataactagtttaagtgacggagaatatgctaagcttcgcgaacgttataatcaaatttacacattagctaatgtgcgaaattataatctagtaacatttaaggatggaaatcaaaatagcttgctgcttaattttgatattatgccaactgaaggggtagtttataatttacgagattcaaataataatataataaggagttggcaatatactggacagagttatgaagatcgaggaattaaatatgaaatagaaaatgggaaaggcaagggatatgtcttaactctaaagttttctaatggaaatgagtatgtaatgaatagcattaatatagacgaattgagtcaatag

SEQ ID NO: 182 - DNA, 2514 bp, Artificial sequence
  Synthetic polynucleotide or polypeptide
atgaatcaaaattgtaataataatggatatgaaatactggatagtaatgacatgtatcgtcagctaaagtatccctttgcacaagcaccaggttccgaattccgaaaattggataataaagatgagagatacccaggtgtgtgcaggacatatacagagcttcgaagtactttagatatagggttatctattcgcacagcaatgagtatcttacaaacgcttctgtccgtaggattccctgcattaggaagagctgctggactcataaatactatttttggatttctttggggacattttgctggccaatctatttggaacagttttatgaacgcggtagagtatcttatagatcaaaaaattataggatctgtacgaagcaaagctcttgcagaattagaaggtatacaaaacactttagaattatatcaagaggcagcagatgcttggaatggagatccgaataatgaggcatataaagaacgtattagaagacagtttacagctacaaatacagtaatcgagttcgctatgccatcatttcgatctctcggttttgaagtgccgttgttaacggtgtatgcgcaagcggccaatctacatttacaattattacgcgatgctgttaagtttggaaacagatgggatttgccttctgtagaaatagaaaatttatatacgaggcttcaaaaccgtacagcagaatatacaaatcattgtacagatacgtataatagagggctaaatgaagctaaaaagttaattggaaaactgaatccaagcaatttcaataaatacccatatttatatccttatgccgatggtactagtggtactaactattataaggggcaaggtcattattacgggcaagtacttgattggaatgtgatgaatgattatcgaagagacatgactcttatggtacttgatatagtatcaatatggccaacatttgatccaagacgatattcaaaccctaatggtgtgagtatacagctatcacgagaagtttattccacagcatacgggaaagtgggacgttcgaatgaaaattgggagtttattgaaaatagatttgttcgaccacctcatcttgttacgtggttgtcaaacttagcaatccgcatgtcagaccgacctagtcctgaagacatgatgcaatttgtgggagtaaagaataggctctcatatatagggggacctaccacgtgggaggagggctttaataataatagccctgctaaaggggaccaaaatgttcgcgctgatcttgttggtggcttgagagcagttgctggcccggttccatgcagttggcaatttttagatttctttgggaaccaatttcaaaccgttgggcggtgtccgagggcgaacccgggcactgtcttctcacatatatatacacttgatgatagtataactacgccttcaaataattcaccggcttctcaccgcttatcttatgtaaatgcggcagaagctgacctcaactatcgtggaggatacaataataggttctggggactttcaacatggggatttggctgggtacacgagagtttaactccagaaaatacaatcgtttctgataaaacgactcaaattccagcggtgaaaggaaatgctgtagataatggtgctacggtggtaagaggacctggaagtaccggaggggatcttgtaaaactacctgcgtataatcagcaatggactcaattacgtgtaaaagtaagaccgtccgccactgcccgaacaagacgatataacgtacgcattcgatatgcaagtgaagcaaatgcagatctatttgtagggaagtatgtggatgcggcgaatagctggtatgaaactggaaactatcctgtggatcgaacattttcagggagtatgacctataacgctttcaaatacttggatgcgatcagctttgcggcaaatgaagaagaatttaaaatagagctacgttgtaatagtggtggccctatctatattgacaaaatcgaattcattccggtaaatccgattgaagaaggatcaaaaccaccagaaccaccgacgccagaactaccgccagcaccgggtacctatcaaatcgtgacagctttaaataatagtagtgttttagatatggcctcacgctccctcgctcctaatctttatccagttgtactatggcaaaatgggggcagttataatcaaaaatggaaattcgtatataactcaagtcaagatgcatatcaaattaaacctctatccccagactatctttcattagcttggcagggtgactcgacttatgtacgtgttgaccatcaagcaagctttccaatacgccattattggaaagttgaagatgcaggaaatggatatgtttatttaagagctaaacaagatccgaacaaagtaatggctgtaagtaatgggaattctgcaaatgggacagatattatcgtacaggattatcaaggttctgctaatcaaaaattcaaactagttaagttggattaa

SEQ ID NO: 183 - DNA, 3942 bp, Artificial sequence
  Synthetic polynucleotide or polypeptide
atgaatcaaaattatcataacgatgaatatgaaatgatggatagtggcggcatgtatcgtcagctaagatatccttttgcgcaggcaccaggatctgaatgccaacagatgaattacaaagattggatgaatcagaatggatttggagaattattcgaaaatggaactccaagatccattagagatgcagttcttatagggacaggaattgtatcgaccatccttggtgccttttttccaattgcaggagtcgtaggcggactattaggtatattaattccatacctatggcctgagaatgcaggccctcctgggacaccacaagcgcaatttacatgggaacagctaatgaatgctgtggaagacttggttaacgaaaaaattgataatttagtaaaaggtcgggccatagaaaccgtacaaatcttacaatcgcgtttgagagattatcagcaagcaatatgtaatttgaaactagatccaacgaatgagagatataaagaggacgtgagaagagaattcaatgatgcggaggatcaagcgaaagcctctatcatccaatttcgaaatgagaaatatgccactttattattagctgattatgcacaagccgctaacatacatttacttttattacgagatgttgttcaatccggagaaagttggggattttcaccacgtgaagtagaacaatattattccaatacatcttcgattggaaacccaggtatgctgcaactactagcaacctatacagaccattgtatacgttggtatgatacaggtttacagcaacaatataacacgggtaattggaattcattcaatgatttccgtagagatatgacccttatgatattggatatggtggcactatggccatcctataatccgaagtactatccattaccgacaaaatcacaactgacaaggactttatattcaccagctcgttacacaaataatttgggtagtgataattctatagcagcctacgaaaatactttagtcggtcctccacgtctatttacatggtggcgtggattagatctaactacacaatattatcaacagggtggtaccagatttgttggattccaacagcaatatcagaataccctagatagcactgtgtacgaaagtagtttccaagggagttttggaacggcaacaaaatcccttaagattccatcaccggaatcaaaagatgatgtttggaggattactgctaaccgagcctacggatcaagcgacactcatcagttttcattttatctgaccgaatctgggcgtcaggacctatttgcagagccgactcagtatccacttgacccctatcctggtttcccttgtagacctaatactggtgaggattgtaatccttgtaatcctaataatgtttgtagaactgaaattacgaatacaacagatccttgtgatgaagtagatctgtatagtcatcgagtatcacgtatgggggcatattttaccgggagcgagtattcaacaatgaatcgctttagtttcggctggacccatataagtgcggatgcaaacaatctaattgatcgacaaaagattacccaaattccagcagtgaaaggatatagtttgtctggcgctcctgatgtcataaagggacctggtagtacaggtggagatttagtatccctacttcctaatgcattcattcagattaggttgacagggcaagtcgcaaaaggatatcaattacgccttcgctatgcatgtcaaaacatgggggaaatatggatatccagggaagtttataataatgattattggtcctcagactttagcgaaaccattgttgctcctgcaacatattctggtgaatcactacaatacaattcttttggttatatgacggcatcccaaccgttacagactaatcttttcgacgattggaagatgacattctataatagtggaaccacaccactcatcatcgacaaaatcgaatttattccaattgagggttctgttgaaacttttgaagcgaatcaagatttagaaaaagcgtggaaggcagtgaacgctttgtttacgaatgatgggaagcatacgctgcacttgaatgtcacggattatcagattgatcaggccgcaagactcgtagagtgtatgtctgataaggtctattcaaaagaaaaaatgtgcttactcgatcacgtgaaatgtgcgaaacaactgagtcgagctcgtaatgtattatactacggtgattttgaatcctctgattggtctggtgagaatggatggaacacaagcaatcatgtatccgtggcatctgataatccaatctttaaagggcgttatcttcagctgcctggtgcgaatcagccacaatttagtgaacaggtattcccgacatatgcgtatcaaaagatagatgaatcgcgattaaaaccgtatacacgctatagaatacgcggattcattggaaacagtaaagatttagaagtattcgccacaagatatgagaaagaattccacaaaaacatgaacgtaccaaatgatatcagaccatcgaatccatgtacgggaggatatccattggaacaaggttcctatccggtggtgacaaaccaagtcatcccgcaaaacatgtcatgtggtccatgtgaagatggatcacagatgatgatgcaacaaactagtatggtgtgtgcagattcacatgaatgggcgtgtcacattgatacaggtgagctcgatatggatcagaatttaggcatatgggttggctttaaaatcggaacaacagatggcatggcaacactcgataatatagaagtagtcgaagtaggtccgttaacgggagaagcattcgctcgtatgaaaaaacgcgaacacaaatggaaacaaaaagggaacgagagacggataaaaatagaaaaggctgtgcaagtcgcacaacgtgcgattcaggcgttattcacacatgccgatcaaaaccaattgcaagcctctatcacattacagcagattatagacgcgaagaaatgggtacaaaaaattccgtatgtctatcattcattcttagtaggagcttccgtaccaggagaagcgtataatatcttccaacaactttccaatgtcgttgcgacagcacgagcgttatatgaacagcggaacgtgctgagaaatggagatttcaatgcaggtttatcgaactggcacgggggagagggagcgaatatacaacagattgggaatgaatctgtgctcgtcatctcggattggagtgcaaacgtttcacaaacagtaggtgtccatcccgaacatggttatgtgttacgtgtcacagcgaaaaaagagggctctggggaaggctatgtaagaatcagtgatggtacggaagaaaatacagaaacactgaaatttatagcgggagaaggtgcaacaaattcggtaccacctatgactccgcctcgtgaatcctattatgagcaagatatgacgaactatccatcagaacaaagtggaccacagacatatgcaaataggaatcaaatgaattaccagtcagagagttttggaatcaatccgtacggtgatgagaataggatgaacgcgtcatcgccttatgctggaacagattgtggatgcggctgcagtacaaaggcatatgctggcggatatgatactatgagttatgcccctaacaactatgaaatgaatgcctactcaggtaacgcaaacgaagccaatcctaccggatcgagttgtggatgtggatgccatacaaaagcggacacaagtgaaacgagtatgactgcgtatgcttctgagtccctttctggttatgtcacgaaaacggttgaaatcttcccagaaacgaatcgtgtctgtattgaaattggagaaacagcgggcacattcctggtagaaagtgttgaattgattcgaatgggttga

SEQ ID NO: 184 - DNA, 2829 bp, Artificial sequence
  Synthetic polynucleotide or polypeptide
atggttactacaaaactgatacctagactaaaagctcttccagactttattgatgactttaacggtgtatatgggtttatggataacatttctaatctaataggtacaatttttggaattaatactggtgattcatctcttgatgctgtattagagaatcaagagttattacaacaaatgatggatcaaatgaatactatgcagggcacgttggacgacattttgcaaaatcaaggattctccgaagacgtactactacagcttcgaagtttggcaagtgatcaattagaactctcaaagtccattaatacagagcttgtacaaattgaaggtattctaaatacatatttacctgcaattagctctatggtaaatacagtatatagtcaaacgtcacagattaacaaaaaagtagataaactattacaaatgatggcatttgctttgcaagaacttgattatatcaaagataatgtggtactgaattcgagtattatagaaatcacaccccatgttcaaaagttgatttatgtgaatagtaagtttctttcgctatcaagaagttatttacaaggtgaagatatgagtattgatagaatgcaagaacttattcaatgggcaaaatcaatagttgatacagatatgaacagctttgaattttcagtggattcattacacactattataatgggagacaatttatataaaagatctgctttagcaaccttcgccgatgttttattggatgatgctagtcaatatggagatttaggtacaccagtagcgaaattttatacatttttttcttcattagcaacgttacaagcaaatgcttatctttgtttaactttcgcaagaaaagttttaggtcttactcaaattgaatatcaaataacgatgaaagagcgcattagtaaccagagtcgattatttacacacttaattcaagataagagtgtttcctcatatcttgaagtcaaagggcttgctggtggtatgccgtatacaaaagagataaaatcatttgacctacaagctaaagatggatatgcatttatcggtttagaatttattttggatggtaacgaatataaagtaaaggcctatcaagctaaggtagataaaaacttttcagtacatgctgatacagtagaagaaatcataagcgataatttaatgaaagtgttcacatataattatatggactcgggtatgaaatacgttaaatttcctttatcaggagatttaactggtgcaactaatactttaattactcgtattggctttggttgtaaaaaggggcaaagcaaagattctaaggtatatgcctatatagatgctgatttttctccatataatccatacacaggagagataatgaaagagggcacagaaacaattgcgttagaaggaaacaaggatactgttaacgcttatggaatatggcctattggtttattgggagatctttacatggcacctttaaaatctttatttttaagtgttgatgctgatagcgcttcgtatattgatgccacagacgccgtacttaattttggtggtgaatcttatcttcctacaatattgtctaaagaatatgatgctaattttatcatgtattctcatatcgagaatactgatcaagtgaatatgaatatgcttatgaatggagatttcgaggaaggaaataaacattgggatatctcgttaatgcctgcatattttgctgaaggagaaggtgtgggtggttcaaatgctttaaaagctatggaatacggtacatttgaacaaccagtcttcttagaacccaatgcaaaatatatactacaggcatacggaaaagtaaaaggtaattcttcatcaggccgtattggaatacgaaaccctagaggtgattactactgggaaaaaatttttacatcgttacaatatgagttagttgaaatagaatttcaaacaggaaatgatacttcaaatttatccatcttttttcaggcgttcgggggaactagttggttagataaccttaagttatatgacctcacacaagaagggaatttaatagcgaatcctaattttaaatcaggggatctttcccattgggaaaccagtggtgaagcaaatactgtaaaagaaaaaggaatgtttaattcgtatgctatacaaatcgagaaaaacggaaaaattaatcaaaaagtaacaatgaaacccaatactcattaccaattggaagcatatgtaaaagtggataataccaatactactggacaaattggatacggccaaaactatgtagcatgtaatacaacttctttcacatcagtcactgtaaaatttagcacaggtgatagtcctctcaatacagaagacgtggtgtactgtacaaattctagtaatcagggtactgtttgggcagataactttgtgttacaagaagttcctaatttaattgataatggaaattttgaacagtcaaatcctactgcaccttggacactttccccctctgataatggtagaatttttatagaagataaagggatttatttattaaataaaggtcaaattagtcaaaaagtaaaattaaagccgaatacaaaatatacattgacagcatatgtaagagtagggggtactggtagtgcaaatcttggatatgggaatacaagtataacgtgcacttcacatgaccttaaacatgtgagtgtggactttataactggttctaaccctaatattgatagtgtatacttgtctaatacaaatacagatagaaacggttctgtttttggaagtaaatttgagctgtacgaatcagaacaaatttaa

SEQ ID NO: 185 - DNA, 1467 bp, Artificial sequence
  Synthetic polynucleotide or polypeptide
atgaataattgtgataatcaaacaagggacgttatcgttccaactgcacataataattacgttgatcttaacggaatattaacaatagatagaagtggatttaatgttaatcgaactgttgataatacaaaaacagattggatggctaatattccaaattcacgtcgggtcagtgaattatcaattccgggaacacatggatcaatggcacttcatggtggagttgctggaactataggagatatagccattaatcaaacaatgaatcttgaaactcaattaaactcaggaattcgatatattgatattcgctgtaggcatcatcataataatttggctatccatcatggccagatattccaacacgcattttttggttctgatgttttagatcccgtgataagatttttaagacgaaaccccagtgaaacaattttaatgcgtataaaagaagaatacaatccaacgggcaatacaagaacttttagtgaaacctttgaatctttctggactccaaatcaacgttatttttggactcctactggtactaatccaacattgggagaagtccgagggagaattattgtactacaagactttcctggttttaatagaaattttggtatcggttggggacagttagctatacaagatcagtggcaggtaggcataaatcaatggtacagtaaatgggtagctgttagaaatcatttttttaacgcaatgaataatagaaatcgaattcatattaatcatttaagtggcaatggtgggttttcaggaccaagaccctggtttatagcatctggttatagaagccgaaataacaacagtcttttagatgttgcatcttctcgtcctgtacttggtgggtgggcagatttcccgcgtgttcgccccacaatagggcctgtatatcggggaggaataaatgtccttgcagctagaagaattttagaccgaagatttactcatacaggaattgttgctgctgatttccctggaagaggattaattaacggcacaattgcgttaaacttccctgaagaggttagggggaattttaaaattgtaacaagcctcaataacagaagtcttgtagatatgaatttaagtggaaactccattgtacatttatgggacaatgtgaatcagagaaatgcacaatgggagtttatatatagtcaacaaagaaatgcatatataatacgaaatttaagtaatagaaatttagttttatctatggattatcctcgtactaatcaggtatttgcatacacatttcatgcagatgatgcccagttttggattttagaacctaatcagggtggatatataattagaagtgctagaaatagaaatttagttttagatgtttcaggtgcaagcacaaatcctggaacaagaataatagttttcccttttagtaatggaaacaatcaaagatttagattagcaagagtatag

SEQ ID NO: 186 - DNA, 1188 bp, Artificial sequence
  Synthetic polynucleotide or polypeptide
atgaaaaaaatcccaacaaaactcctgacgacatcagcactagttacagcattacttacatctggcattgtaacaccggcagcatcagctgaagttaatacacagcaaatcaaacaagttcaacaacaaataaactcaaaagacatggccgtatctcaacaatttaaaaaccaactacagtctactaattcaaatgttctagtaatagagacatacgctaatacggttctaacagtcccaacgtttaatttaacaggattaaatgcgaatcaaattgcaaaagttaatacagatttatcaactgcacaaaataatgcacgtcaatggttaaatgttattaaaccaggattgctttatttaaatcaagatgtaattaacttttccaatcgatatgaatcctattctgaggatttaaaaaaggctgtagatacaaaggataaagcaaaattagcagatggtctaaagcgtcttgcgtcaaatgctgcaagttatgaacaaagagctaaagagaaagttgcacaattgcaagagtttagagataaactaggtatagacgctggtaattttacaacaagttcaaatgctattttgacggttatgagtagtcgtgatcagggtcttccaagtctattagaacaaataaaggttaatcaagataatgtaaacaaaggtgttggtttaattataggtggttctgtaatattagcagctggtgtaggcggtgtcattataggtacattaattactgtgggaacacttggtggaggtacacagattggacttctagtgggaggcgccggtgctgcaggcatagccggtggaagtgtcatgattaagcaaggtaatgatttaatgaatgctagtcgagatactcttgtaaaactagtcacacagaaaacagaatgggaacaacaagcaattgcgttaacatttgctcaaaaaaacatagatactttaaaaacacaagccactgaggctgtaactgctgcacaagggttagcaaatgagtggtcacaacttggggctaaattcaatggattagcacaagctgttgaattagtagatttaaatgatatagatgcagcaacttggattaaagctgatattgataatgccaaactttcttggaaagatatcaaagactttgcaaactcgatgagtacagcaaaaattgaaatgaagaattag

SEQ ID NO: 187 - DNA, 4038 bp, Artificial sequence
  Synthetic polynucleotide or polypeptide
atggggggattgttgatgaatcaaaagtatcataacaatgaatatgaagtcatggatagtggcgggatgtatcgtcaaccgagatatccttatgcgaaggcaccaggatctgaataccaacagatgaattataaagattggatgaataggtgtactagcagagaatcgggagatacattctctactgctgccgttaagggggcgattattacatcttcaggtattgcgtgggcccttcttgggcttattccaggcgtcggtcctatactatccgcagctgcaggagtaataaatgtagccgttccatatatatggccagatcaggacagctctatgcctcctagtcaggcaacacaatataagtgggacgaactaatgaatgctgctcaagaacttactgacgcagcaattgagacagaagtgaaaaatagggttcttcaagaattagtagggcttcaaaggactactaaattatatcaagatgctgcttgcgattggagcagcaacccagatgatccggaacttaaagaaactattagaacacaattcattgcttcaaatacgatatattatgatagaatgcctatttttcaacaacaaggttttcaagcagaattattatcttcatttactgaagccgctaatttgcatttacttttgttaagagacgcggttaaattcgggttagcatgggggctagaccaggtaacagttaatcgatattatcgatacctaaaagaaaatacagcagcttacacagcatattgtatctcgacatttaacaacgaattagcgagactaagtacaggaactgggggagccacttcatggaataagtataatcagtatcgtacgggtatgacaattatgtcattagatattgtggcattatggtcaacatttgatccaattttatatccactaccagtctattcacaacttacacgtgaggtatacacacaggtatatggaaatttgaaggatagctattcgctgcagacaattgaatctgaggtaattaggccgccacatctgtttacctggctgagaagatttacattcggggtcgataaagacccgtttagggatcatgattatattactcgttataaattaggttttagctatatttcttctgaaggtattacaaatggagagccaggagaagctggatggatggaaacctcatggaaaggacctagacctggaaatacaacccaggagggaactcctgggtgggccagtatatataatacatttgtgaatccagcttccattaatactgatgcttcgggattaggcttatcccgacttgtttttcgtggtaatgaggatgtctctggcttgggcttttatgctgacattggtcaaaagggtggtttaaatgcagatgcgtcaggacagtttgtaggattcccttgtattaatcgtaccgaatgtgacacttcaaaatcttgtcttgatacatgtaaacctagcagtacacctaatacaagtagtccttgtgataatcaattcagatatagtgaacggctgtcatggatgaccccatttacacgtaccagttactctggacgtgatgcttttgagactattgtctatgcatggacacacgctagtgcgcaaacatataatattatagataaaaattacatcagccaaattccagtggtaaaggcatctggtggtagcggatatagcgtaatcaaggggccaggtagtacaggaggagatcttgttagcttgacaccgaatgctcgaattgaggtaccactgtctccgcaattcgaagatttcccagtagaaactaaaccttgtcgtataagaatgcgttatgcatgtaaattacaaacgaggataaaaattggtatctttaaaaatgacgaatgggaagtacaggaggaggaaatcgttgtaccatctaccccttatcctggtgaacacgctgagttaacttacaatgcatttggatatacaaatcttacatccttaaatcttacatttccaagtaatgaactaatatatattgagagaatagattcatctgatacagaacctctcatcatcgacaaactcgaattcattccaattgaggaatctgttgaatcttttgaagcgaaagaagagttagaaaaagcatggaaggcagtgaacgccttgtttacgaatgatgggaagcatacgctgcacttgaatatcacggattatcagattgatcaggctgcaaaactcgtagagtgtatgtctgatcagatctatccaaaagaaaaaatgtgcttactcgatcatgtgaaatgtgcgaaacaactgagtcgagctcgtaatgtattatactacggtgattttgaatcctctgattggtctggtgagaatggttggaacacaagtaatcatgtgtttgtctcatccgacaatccaatctttaaaggacgttatctcaaattacctggtgcgaatcagccgcactttagtgaacaggtattcccgacatatgcgtatcaaaagatagacgaatcgagattaaaaccgtacacacgctatagaatacgaggattcattggaaacagtaaagatttagaagtattcgccacaagatatgagaaagaattccacaaaaacatgaacgtaccaaatgatatcagaccatcgaatccatgtacgggagaatatccattggaacaaggttcctatccggtggtgacaaaccaagtcatcccgcaaaacatgtcatgtggtccatgtgaagatggatcacagatgatgatgcaacaaactagtatggtgtgtgcagattcacatgaatgggcgtgtcacattgatacaggtgagctcgatatggatcagaatttaggcatatgggttggctttaaaatcggaacaacagatggcatggcaacactcgataatatagaagtagtcgaagtaggtccgttaacgggagaagcattcgctcgtatgaaaaaacgcgaacacaaatggaaacaaaaagggaacgagagacggataaaaatagaaaaggctgtgcaagtcgcacaacgtgcgattcaggcgttattcacacatgccgatcaaaaccaattgcaagcctctatcacattacagcagattatagacgcgaagaaatgggtacaaaaaattccgtatgtctatcattcattcttagtaggagcttccgtaccaggagaagcgtataatatcttccaacaactttccaatgtcgttgcgacagcacgagcgttatatgaacagcggaacgtgctgagaaatggagatttcaatgcaggtttatcgaactggcacgggggagagggagcgaatatacaacagattgggaatgaatctgtgctcgtcatctcggattggagtgcaaacgtttcacaaacagtaggtgtccatcccgaacatggttatgtgttacgtgtcacagcgaaaaaagagggctctggggaaggctatgtaagaatcagtgatggtacggaagaaaatacagaaacactgaaatttatagcgggagaaggtgcaacaaattcggtaccacctatgactccgcctcgtgaatcctattatgagcaagatatgacgaactatccatcagaacaaagtggaccacagacatatgcaaataggaatcaaatgaattaccagtcagagagttttggaatcaatccgtacggtgatgagaataggatgaacgcgtcatcgccttatgctggaacagattgtggatgcggctgcagtacaaaggcatatgctggcggatatgatactatgagttatgcccctaacaactatgaaatgaatgcctactcaggtaacgcaaacgaagccaatcctaccggatcgagttgtggatgtggatgccatacaaaagcggacacaagtgaaacgagtatgactgcgtatgcttctgagtccctttctggttatgtcacgaaaacggttgaaatcttcccagaaacgaatcgtgtctgtattgaaattggagaaacagcgggcacattcctggtagaaagtgttgaattgattcgaatgggttga

SEQ ID NO: 188 - DNA, 2529 bp, Artificial sequence
  Synthetic polynucleotide or polypeptide
atgagagaagaaggatggaaacggatgggaggattttcaatgaaccaaagttgtaatagtaatggatatgaaattctggatagtggtaaagggtattgtcagccaaggtatccttttgcgcaggtaccaggttctgaactacgaaatatgggttacaaagagtggatgaatatgtgtactagtgaggatcctaccgtcctgagggagggatacagcgcagatgtaagggatgccgttattacaagtataaatatcgcttcctatcttctttcagtcccattccctccagctggagcagccgctggaatcctaggtgcactacttggtctgctttggccttcaaacaattcacaagcagtgtgggaatcatttatgaatgcggtggaggtcctaatcaatcaaacgattgatcgatatgtacgagccaaagcaattgcagaattaagaggtcttcaaaatgttttggaattataccaagaggcagctaacgactggaataaaaacccagataatcagcaaaataaaaatcgggtattggatgagtttcgtggtgcgaatagacacttcgaaacatctatgccatcatttgcagtagaaggatttgaggtaagtttattacctgtatatgcagaagctgcgaatctacatttactcttattacgagacgcagttaagtttggaaaagagtggggcatgtcttctgtacctggtgaagaatgggatgatatgtataggaggctccgatcacgtacagcaacctatacagattactgtgtgaatacgtacaatcaaggattacagcaagccagaaacctaaaagcaaacgtatccgactatagccgttatccatggacacagtataatcaatcaggtgggacgcccgttcgcaaacgtgatgcccgaggagagtaccaaggtacagaaaattggaatttgtacaatgcgtaccgaagagacttgactattatggcattggatattattacgctatttccaacgtatgagccgagcctttatagtatcccagtcaaatcagagctcacacgagaagtttatacggatatacggggaacaacatggcggagcaataccaccttcaatacgatagatggcatagaaaatcgcatgttaggaaatcgacaatcacaattatttacttggctaacagggatgaatttgtatataaggtatacgggaaagtcaactaattttacacatggtgatctgatggtagggttggagaaaaaagttcgaaaaacgaatgccagtgaccaatggcttccggtagaaggccaaaaaacagattatacgagggttgataggcctgggattgagtttggagagtattattggtattatgcacggacgcaacagtggtttgaaacgagattgttacaattatgggtgaatactggtactctttcattaaatgcaggaacgataggtgttggtggtgaattttggcagcgtgatttgccgcaatacaaagatatatatgcaagaagtacgcgggatcattctattgagaatcatcggttatcttggattaaatttgagcctgtacgggatgactgtcctttcgcatggcctcagtataaacaattaagcgccttgttatttggctggactcataacagtgtagatctattcaatacaatagcatcgggtagaatcacccaaattccagcggtgaaggggtattggaatcgaggtgcgttttcggttgtgaggggacctggttttactggcggagatttagttcaattaagcctttctggcgaagtatcaatcaaagtaaggccatcacgccctggtacaggttggtatcgagttcgtattcgctatgcggctacagcgaatggtaaacttaatgtcaaaaaatatgttcaaagtacacatgcatctgtaacttatgattatacacagacgttttctggtagttttacttttacatcgttccagtatttggatgtctataactttaatctcgcagaatctgaatttgaggtgtggctcactaatgagagtggtggccctatctatattgataaaatcgaatttattccggtaaatccgataccagagccaccagtaccagaaggtacctatcaaatcgttacagctttaaataatagtagtgttgtagatatggatccaggtccagggagtaacactcataatgttcacttatggcaaaacggtaacgctaataatcaaaaatggaaatttgtatataatccgagcacaagagaatatcaaattaaaaatctagcaaatgaaaatttagtattgacttggaatgactctgggggggcaaataatgtgtttgctgcaactaatcaacaattagatacgcaatattggatagctgcagaggcaggtaatggctatgtgtatttgaaaaataagagagatcagaataaagtattggatgtaagtgattctaatactacgaatggaacgaatattgtagtatggaacaataatggtggtaccaaccaaaaatttaaactcgttaagttgacttaa

SEQ ID NO: 189 - DNA, 1023 bp, Artificial sequence
  Synthetic polynucleotide or polypeptide
atgaaatccgatacaaatgaagtgagtgcagctgcaattgagttagtagatttagacgcgtatttacttacaaaagcttggcataatatcgtggctgggcctgtgggtttcctttggagaggccttggactgcaaccaggatttggtacttggggtttcactgaagattttatccccactcctaatccaagtcaaatccctagcccttgtcgaggacctggtgcttcaagttgtgtaccagtagggccacaacacccagctatcgatacatcttccttaattgggactggtttaaacgtaactgaagaagcacaaactttagagcaattgacacctgttattgcggatcgtcatgtatttacgaataactcgagtattcaacaaacgtattacactcctgggtattcagaaacgacgagtacaactcaaacaaatgcaacgacacatgggtgcaaagttggagtaaaagtaggggcatcttataaaaccaaaatatttgctgtggaattaggatttaatattgaattaagtgcagaatataattttagtaatacacaaacaacgtcaactacgacaagcagaactgtaacttttcaagcatttcctgtattggttccagctcatactactgcgatcgtgactgtaacattaaatagagtgagatacgtcaataatgatgtgccactccaaatggatttatcaggaaggtttaaaacttatgctccaaagaatccgagtgattatactttgtgggatttaaatccttacatgcaatttcctaacgagtgttgtgggaattgtcctgaatgccgcgtaccaacaagtttgcaaattcttcctgataataggacggttcgttttaagggaaggggaacgtttacagcaaatatagcatccaataatttcgtagtaactactacttttgtgaataatacaactggtgcgaaaatttctgagcatgtagaatatgtaccagttatttaccaaggccccgctgtagagacagtatccacatcttcatag

SEQ ID NO: 190 - DNA, 2916 bp, Artificial sequence
  Synthetic polynucleotide or polypeptide
atgaatcaaaattatggtagtaatgaagtggaaatactggatagtagaaatatgagttgccagccaaggtatccgtttgcgaaggcaccaggttcggaattccaacagatgaattacaaagattggatggatatgtataacaatgagagtcaggctttcatgggagagcgatacaacagctctataagagattcaattattacatctacaaacattattgcctaccttctttcgatttcttttccaggcgctggagcggccgtagggattataggagcactgcttgatctactttggcctacaaattcacaagccgtttgggaagattttatgaatgcggtagaagctctaatcaatcaaaacattcaaaatacggtacgtgacaaagctattgctgaattagaaggtcttcaaaatgttctagaattatatcaggaggcatttaatgattggagtgaaaaccccaaccaacaaaaccgttatcgggtattagctgagtttcgtggtgcaaatagggcattcgaggaagctatgccatcctttcgttttggcgactttaaggtggaattactaactgtgtatgcacaagctgccaatctacatctactcctattaagtgagggggttaaatttggaagagattggggaatgtcttccttgcctggtgaagaatggtcagatatatataataggcttcaaagacgtacacaagagtatacagatcactgtgtgactacgtacaatcaaggtttagagaaggcgaaaatgttagtagccaatctatgtgatttaaacagatatccatgggatcgttataatcaagagttcagagcatatagctatccaaattgtggtgcgagatcattatatataggggatcaactacaacatgaatgtaatgaacaaatgaatccatatatggcaagtatccgtcgatcattagatgaatacaggggattagagaattggaatttatttaatgcttttagaagagatatgacaattatggtactggatattgtagcaatgtggccaacatatgatccaattctatacgataatccgtatggtataaaatcagaaatcacaagagaattatatacagatatacgagggacaacgtatagaagcgataactctcaaaatactatagttgccatcgaagggcgtatgataccacaacctaggttatttagatggttaaatcagtttagattttattggaggcgacttagttcggattatactgctggacaaattattactggcttgcaaataacggtacaaacaactttaggttcttccgaaacattgcccttagctggttctggaggaacgtctactacaacttggcatccctcatatggtattacttggatagataccaagcagtggtttgaaccgagatggatgcgattttggagtggcagttatgacgcagggtggacagatcatggaacaataggaacaatagaagaagacaatcctttttgggctgcgggaccgcaaaattacgtttataacccctcacaaagagcaaatgaaattccgaaacatcgattatcgtggatgaagtatgagccaattagatcgaattcaccttttggttggacggaatatcaacagttaggtgctcttactttaggatggacatataatagtgtagacccgaacaatacgattgtatcggataaaatcactcaaattccagcagtgaaggcatttcaattacgcaataatgctagtgttgtaggggggccggggagcacagggggtgatcttgttcaactatctgcaacgagttctggcaatagacaattatggataaaagtgaaaccaactactatagcattagggcgcagatttaaggttaggattcgttatgctgctgcagccactgctacatttactgttcaaaaatgtgtgactggcgttgcttgttgggaaacagcaacaaaatctgtcacaactacgtactttggtgcattaacatataatgcttttaaatacgtagatatttttgaaatacctgcaaacgaacctgaattttcattagagtttttgggtacaagtggaggacctatttatatcgacaaaatcgaatttattccggtaagtccgattggagaaggggaaataccagaaccaccagcaccactactttcctataattatcaaatctttacgtcgttaaatgatcgtagtgttgtagatatggatccaggtccagggagtaacactcataatgttcacttatggcaaaacggtaacgctaataatcaaaaatggaaatttgtatataattcaagcacaagagaatatcaaattaaaaatctagcaaatgaaaatttagtattgacttggaataactctggaggggcaaataatgtggttgctgcaactaatcaacaattagatacgcaatattggatagctgcagatgcaggtaatggctatgtgtatttgaaaaataagagagaccagaataaagtattggatgtaagtgattctaatactacgaatggaacaaatattatagtatataattttaatagtggtaataatcaaaaatttagattggctgatgttgcaggaacattagcggcacaggtagaatcactctatcgtccgcagcctggtcaaagcagcaggtcaagtgataatttttcacttggacatcttgccgctggtaccatagtacatgttgtcttagaaggcgcaggtgctacatccttgtcatttggtgttgcaaaagatatacgtaatggtccagaccgcggaatttggtcaaatgtaagggatggttctactctaagagttccttcgggagatgatagaaataatttgtatattgcaggtcctcctagcggatacacttctaacggaacatttacagtaaaattctacgctctttaa

SEQ ID NO: 191 - DNA, 3639 bp, Artificial sequence
  Synthetic polynucleotide or polypeptide
atgaatcaaacgattaccaaaatacgaacggcagtccattctttgttttccaatcgtaatttactattgaatagcactgattatgacatagatcaagttgcatatctcgtggattgtatgtctggtgatataggttcgcaagaaaagatgatgttacttgatcaaattaagtttgctaaacgtttgagtcaaaaacgcaacctgttgaatgctggagattttgaatcattcaattggtcagatgagaatggatggagaagaaatactcatgtagttgtcgcatcgggccatcctatgttcaaaggacgatatgtaaacataccaggtgtaacaactacgttaagtggaacaatcattccagcctatatgtatcaaaaagtagatgaatcaaagctaaaaccgtatacaaggtatttgataagaggatttgttggaaatagtcaagatttagaggtatttgtattacgatatgcgaaagaagtgtacaaaaaaataaatgtatcaaatgatcatagctactctaatctatcacatacaaatggagacgggaatgggtgctacgatagctatccaaaacaaatcatggttcaaaattcgagtgatataagcaaaaaaccatatgagtttacatgtcacattgatgtaggagagctgaatctcaaggaaggacctgggatatgtattggttttaaaattggaacgacagatgggatggcaacattagctaatatagaagtggtagaagcccatccattaacgggagacgctttcgcacgtataaaaaaacgcgagcaaaaatggaaagcaaagtggacagagcgacgcgtgaacattgaaaaatcaatgcaagtcacaaaatatgccatacaacagttatttacatgtccacaacaaaatcgattacaatggacgacaacttggactcatattctgcgtgcggaggcattcctatccaagattcccaatttatataaccagttttctttagagaattttcctatattaccaaaagaaacctatgacatccttcaacaactttcaactgcagtgatgaaggcaaagattttgtatacacagcgaaatgtaatacgtaacggagatttccagaatgagttagccagctggcatgcgaccgaaggtgcgaagatacagcaaatcgacggtacatctgtcgtggtcatttccgattggggtgcgaatgtatcacaagacgtatgcgtcaacccagagcacggctatctgttacgtgtaacggcaagaaaagagggacctggaaaaggatatgtgaccattagcgattgtacggcaaacaatacggagaccgtaacatttgtatcggatgaagaaaagatcgcatctacggaatcctttcttgatatatctattggggtagaaaacacaagaggaataccatatggaaatggcaatcatacgatgaatacaccatacaatccgtatgaagcaaatggatatccaggtgctagcaacatgaatggtcaatcagagagtttcgaatttacgccatatggtgatcaaaatcaaacgatgaacgattcatcgaatacgaatggaatgcatgcatatccaaatggttcttctctttctagttacgtgacgaaaacagtggaattcttcccagaaacgaatcgtgtacgaattgaaatcggagaaacgaccggaacatttagggtggaaagtgtggaattgaatcgaatggaacaaatcgatgaaacgaaccattcagttgtagatgctcaaacgatagatcaggataccttcgctactccatctgattccgtttcgttttcggaaccatcagtgagtccaagacatgcgcattatgcgtattctcatgatgctacgatcggttatacaaatccaaattggatgtggccacttctagataatgctctttttagtgatttgtccattcctggcacacataataccatggcacgctatggaggagatattacaaaatgtcaaaccatgacacttcctacacaattacaagcgggtattcgttttttagatattcgttgtcgacatattgaaaatgtgtttgcaattcatcatgggcctatttaccagaatgctatgtttggagatgtgtgcaatgatgtcgttacgtttttaagaaatcatcctagtgaggccatatttatgcgcataaaggaagaacataccccagaaaataacacaagatcttttgctgatacatttgcggattacaaatctcgatataaagaatatttttgggatgggacgactgataatcctcgtttaggtcaaataagaggaaaaattgtggtgctacaagatttttcaggacctaggtttggcatcccttaccgtactacacttaatatacaagatcaatatcatttaaagacaaattgggatttatatgataaatggctatttgtaaaaaatcatttatatgccgctgacaactcttataaaagtggtcgtaaacaggcgtatctcaattatttaagtggatccggggggtcgttcccatactttgtagtgagtggacatagtaaccctgggacatccgccccaaggttgtctacgggcctcacaacaccagcgtttgcaagttggtatccggatttcccgcgggtaaattgttttattggaatctgtaccattgcatttgaaggaacgaatattctgactagcaatttgatagaatcgagtaattttcgatatgttggcatcctagccactgattttccagggggaggattcatttcaaatattatacacttaaatcaagtagggattgttcaaaatggtgtgtatcaaattattacagctttaaataatagtagtgttctagatttaaatcaaacaaataacaatgtaaccttatggagcaataacggttacgataatcaaaaatggaagtttgcatataactccaataagtcagcatatcagattaaaaacatagcaaatgaaaatttagtattaactttggattacaatcagagcaacaatgtggttgttgcggtgaatcaggctagagatgaacagtattggatacctcaatctatagaaggaagatattatcatttcaaaaattattttaatcctcgaggagcactagatgtaagtggttcaggtaccagtaatggaacaaacattttgtattgggaattcactggaaagacgaatcaaaaattcatactgagatatcttggtgaaggagaagaagtccaagagggtatctatcagatcgttactgctttaaataatagtagtgttctagatctcaatcaaacgacccggaatgtgatcttatggagcaataacggcgagaataatcaaaaatggagattcgtatatgattcaagtaaagaagcatatcaaattagaagtatagtaaatgaaaatttagtattaacttggggttatccatacaatgtagttgctcgatccaatgaacatagacctgagcaatattggagatttaaatctttaggaggaggaaggtatcatttggtaaactttcgcgatataaatggcgtactcagtgtcagtgggtcgaggacagaaaatggcacgaatattcggtatggagcctatcgtggatggacgaatcaaatatttagattgaataaattaagctaa

SEQ ID NO: 192 - DNA, 888 bp, Artificial sequence
  Synthetic polynucleotide or polypeptide
atggtgattggggctattagttcatcatttgcatttacttccccaggttcagtaagtgcggctcaaattagtactgttcaaaacattgcacaacaacaaaatgcatatatagcagattggagtaaaccttttaaaagtacctatgaatatatgcacggattgcatgattaccattattattccgagagtgcagagtataaacttactaatatttatcagatatcagtagaacaaattggttcacctactattactaattcaagtagtttatttgtagggaggtcaattttaactaataatactaaccaagatcaaatacttactacaaattcatttacaaattctaatacgaatggatttaatttaggagcaaccgctcctgcaacatttaaaattctattagttggggagacaagtattgaaatgtctactgaatataatttttcaagtaccgaggaaaaaacaaagtctgaaagttacacgtatactgctagcgcacaaaatattatagtacctgcaaattcatctgtagaagttattgcgagtttaaatacggctaaaataaatggaaaagtaaatttactttctcgcatagatggaacaatttcttacgatacaatgatgcctactgcttctagagttacagaaccactatcgaaatttacaaaaacggttttgatgtggggatccccaaatgatttacgagttgatcaaaataataatttatatttaatagggaaagagagctattcagtagagtacggaacggaattccttgtaactgtaagacctgttgagaaacctagaggatttactgctacccctagtgaattgactaatgaaggttacacatatacagtaaaaccagaagttaaaaaagaacagtaa

SEQ ID NO: 193 - DNA, 3063 bp, Artificial sequence
  Synthetic polynucleotide or polypeptide
atgaagtttttcacagtaaaagaagcagccgaacaattatccttatctcgtggaatcgtatataaacttattaataacggagaattgtatgcgaaatggatttcaaaaaaagagatgcgaattgcagaggaagatattgcgaaatttaaagaaaatgatattgcaagaacacactaccctataactttagctagccaagagttaaatatacccttggaaaaaacacgcagactgctcaaacttggtgcatttccaaattcaatcaaactaggtaagatatattatatttcaaaaaaagatataatttcatttataaacttacttcagaagaaagaatcttcctataccgtagaagacataagtgaaaaacttaatatcactatctcagcagttcgtgaccttataaaaagagatattttcccaaatgtttttaaattcccttccgataaaagatattatatcccaaaagaagatattgaaggtcacaactttttctctgataatgattcatatcttaccattgaacaagtaagtaaagaattaaatttgaaaccagggactattcgaagttatattaaatcagatacatttccgaatgcttttaagcattattcaaatatgtggtttattccaaaagaagatattgaaaaactaaaagctaagaatataatcccagaaaattatatttctgttgaagagacagcagcacgaatttcaaaacaccctgctgttgtaaaaaaatatatccgtgatggtaccttctttcaaaatagaattattttaaaaagacgggcttatatacctttaacagatatttccgattacgaatcaatgctcaaggtacctgaagaatatatgactgttcaagacgtttgtaagaaacttaataaagataatagtagtattttgtcgcttattcataatggtgaatttcctaatgcatattttaataaacttcaaaaacgatatttaataccgggacaagaactagcagattatataaatagagaagcaacattcaaagattacatttcaattaaagattgtgctcataaactttcttgcacagaaaaagaagttctacaaatgattaaaaatggcactttaaagttcactaaaaaaaacttaaagggagagacatttatatcaaaaaaagatctactcgctttttttaactttaaaaaagctaatgaagatcttttaaccctagagcaagcttctaaagaactggagctgccaagaaaaacacttctcaaattaattcaaaacgagaagttggagttctcttctttttctgatactaactcatccgaattaaattcaaatactaaatttttaattcctaaagatagtatagactctattaaagcaagtaagaaaaagactttttctacgactgctcttgaattatataacaaaaaaattgcaacattacattacagagaagacctcaaaagaactgtaaatttatataccgaatttgtattattaaaaatctctcaaactagaggccaagaagactcttttacagataaagtacgctctttatttaacgctctaaataacattattcttaatttaagaacaggaatcaatttattaactgatgaagagatcgaagaagttttaaacacaaagagcatcccaattacccataagcaaaactttatacaatttttaaactattgttgtagtaaagtacaatgtatatttaaaaatacctataagattgaatataatgaaaagcttaaaagagataaagaaatatatgataaacaaacatttcttgagttttatacatatgtgaataacattgaattacatatttcaatagcaaaacataataagcaatatgcccaaacttggctttttgttattatgcatatgattaacggatggagaaaatccacaatagttaccgaacttccaaacttacctttagaagaaatagaaggcttaaaaatttacgatttagaacaacttaaagataatggactttcaattaatcaatctcaaagtattgtaaattattattatgtggtatgtaagaatatccacatttctaaaacgggttctttaggtcaatttctatgtaatgaaaacatgattataccggctgcaacagcattgctaatttgcgaattacatcgtagaaattccccaaaacaagaacgtctactcggctcgataagcaaatatagtaattcacacacacgttttaatacattttttaacaaaaataaaaaattaccgaaatttaacagtttgattatgaaccgctctctactcactcactttttctatactgtaactaactatggaaaacactcagaaatatctcatgaattaacaaaaaacttaagaaaccatagaaatatgaattcaattactgcttatgttcagtctacaaatcgtgatggtactttggatgacgtctcacttaacttatttaatcgcggaacttttggatggctttataatttcatcatcgatttgacaatggataaggttacagaaaatgatttattagaaaatcgtacatctattatacaagttttaaaaaatgaatattctccttcccaattggaagatatatcatttctactccttaaatatcaaaatgagagaacaccaattattgataaattaatacaacttccaaaagatcaagtgatagagattattattaaaatcttaaagagagaaagtccttccaaaactaagcatgtacaatgcattacctatccacattgctcttttccaaacttcgattcttgtttgaactgccctaatgcagtattcaatatttatttattgattagcattgttgaagaattaaagaatattcacacttctataaaaagcactagctttgatacaattcgataccgtgacacaataaggtttattttgattttagatataattaatcaagctatttcagaatttggaaaatcccatatagagacttttattaacttcgaagtccttgaaaatatcattaccgagacaaataaatattttctcttcgattatccaaattatcacatttctactaagtga

SEQ ID NO: 194 - DNA, 1422 bp, Artificial sequence
  Synthetic polynucleotide or polypeptide
atgtgtagaaatcatcaacagatttcaaattgcaatagatttgatttgatacgtgaatgtaatcgatgtaaacgagtggatgtaaaggatatttatgatccttgccttcgacattgggaacctgggttttctgattgtcctactacgccgcatcgagacaggccaatgaatctttatagatggatgaatgatatcagtgatgataaaaaattaagtgatttgtctatcccaggaacacatgatacgatggcaacgcgagctacgatgccgtctgctcctccttttactgaaacacagacattgagtctttggaatcaaatggcaacaggaataagatttttagatatccgacttaaatatgaaaatggtgccctagcttgttatcatggaatagtttggttaggtaagtattttggtgatgttttagatacagtaaaaagctatctagattcttaccctagtgagacaatatatatgcgtattttacaagaaaatagcaatactgctgtccctgattttctctcagcagtacggaggtatgctaacagtctaccacttaatcgtcgttatacagagggagttacaaatcaaaatccaaaattagaactaacaagagggaaaatggttttttgtatagatgtacaaggttatagtcaaagtgcgtatggtgaccttggaattgattttaatggttattctttttataaaacaacttcagatgatcttaagaagggggacgaaaaagttcgagaagtacaacaaaatttacacattgcaaacgatagagctagtaattcaactagagcttatgtcgttggtttgactgctaatcgtgctaaatatgtagatcttaatggaactccattactaattgcaagatatgtaaatcctagaatttatgattattttattgatcaaaattttaattatgtgggcattgttttagctgattatcctggatggggattgattagtcagattattaataaaaatttcgaaaggctccttattgttaatggtgtttttcaaattgtaacagctttaaataatagtagtgtattagatgtatatccaaattataatgttgcattatatggtaataatggaggtaatcatcaaaaatgggaatttacctcttatatgggggaaatacatctaatacgtaatattgcttatcctaatttatatttatctgtgaattctgcaaacaatgtaattgctgctcctcgaaatcaacttcaacattggctacaatggtggagaatggaacgttttcaagatggatatagaattatacaccatgatagcaattatgtattagatgtaacagctagtaaagtagctaatggaacaaatattattgtagataataggcatcctttaaacactcaagcaagaaaccaaacatttttcatacgataa

SEQ ID NO: 195 - DNA, 1335 bp, Artificial sequence
  Synthetic polynucleotide or polypeptide
atgaaaaagaaagcattaaaaggatttttagtaacatcaattttaacaggaggggggattttcattcccactgtgaccacacctatagctttagctgaaaatacacaagaatatacagggctttccccttcgttacgaaaattgggagcacagtctactctgatacaaatgtttgtagaccaagctttgacacgccctaatatacgaatgagtgagattccggcattactcacacgtcaagtattcattaaacaagatttacaagaatggtcgtctgaaatatatccacatcttatcttaataaatgcaaaaattaaggggtttacctctaaaatgaatagttactatccaacactaaaacaatgtgttgataatgatgattttggaattgaattttcagatagattagaagcgctccgagagttgggtaattctaatcaagataaaatacaaaatcatatcaatgaactgcaatttttccgaacgcaattgggtaataatataaaagaattaaataaacaaatagcagtgggacaacaaatcttaacaacatcagaatcgggtaagatagatcaatataaaaaagatttagtggatgctaagactacgatacaaaaagatttacaagaaattgcattgataccaggagctttaaatgccaaaggatttgaaatttttaaagacatgtatggtttatctaaaggaatcattacaccagctgcagaaatagcattagcagcaatcaataaaggaaaagaaattgaagaatctattgtagaggcagaaaaggcggcagagaaggcagcgaaagaagctggaaaatctactcaagaaatagaattagcaaaaaaagaggctagagacaaaattgaagagagtaaaaaaggagaattggcagccgcagctgcagcaaaatctcaagaatatgatttaatgaaaacaatcgatattgaaaaaattcaacaaacatataatagttttgcagaagttaataaattaacagcatcacaaaaaatatatttagatgatttacaaaaacagaatcaactcatttatacattaacaacaaaattgactgtagcagatatacaaaaggtaatgttacttgagatgcaaaatgatgtagatacttttgaagaattaatcaatcaagagttaacattactagataattataaaaaagattgggagcaaattaaaacgtgtatgacgcaactctctacaaatacaagtaatcatgatatgcaagttatccaacttaaaagattaaaagagtttagcatgcaattagaagaacaaataactcaatttaataatacaggtaattcactttaa

SEQ ID NO: 196 - DNA, 1590 bp, Artificial sequence
  Synthetic polynucleotide or polypeptide
atgaaacagaaaagttttattacaagtattatatgtacaatggctctcgttttcctgtctcatattcctaatgcatatgctgataacggatatagcttcggaaattctatggaggaaggctatatctctatggatttaaaaaagtggatgtctgccattcccaacgaagcgccacttagtaccttatctatcccaggtacccatgattcgatggcattgtatgatggagattcttttggatatgccaaggatcaatccgcttcgctatcaacacaattagaaaaaggaattcggtacattgatattcgtataagggatacagacgatgcttttgccatacatcacggtatagtattcgaaaacgctatgtttggtgacgtattaaatatggtgacaagttttttgaaaaataatccaactgagacagtcattatgcgtgtaaaaaatgaacatgaacaggatataaatcgctatgaagaaatttttcagaagtattgggacgcatataaatcatatttttggaacccaacatcttcaaatccgaaactaggtgaaattcgaggtaaaattgttgttttacaagatttcccttccaaaacacaattcgggattccctactctaagttagacgttgaagatgcatttgacaatgtaacgtatgaatcaaaatggaatatcgtatggaatagacttgataatttgactctaaatcgcgatccgaataagatttatttaagccattttagtgcaaatacaccagacgcttccctcactggtaaaccgtcaggttatgcagagtttattaacccaagaggtataacgtatttaaaggaaaataaatacaaaacttttacaggcataatagccgctgattttccagatactgtatatacccagtctattctatataaaaattatttatactattctcttccaactgataaattgtattccgttcctgttaacatggatatttgtacaaagcaagattatgtgcaaacatgtgtagagaatatggacccaagttaccgcacacatgaaatgtacgagacaattaatcggttagtagaagaggatacattgaatgaacaaacaaattggagtgggaaaagttggtataatttcattcgtttcaattatataattctccctggccacgagcaaggtgtattagacaaactaaatacaatgtccataggaactttcaaaattcgtgatttacttaaagtattaaatggttatcataataatacaaatactattactacgatagtttctgccaacggggtgcctattttccctccagttacgctaagagacgctgtttatacggaccaagtaaataattacccaacatgggttgagttgggggtatataacaagtttaaagttatttctcagcagaacccgaggatttggaaaagattggaagagttagggatttctttgaatgaccagacaaaagacgtaataatagcatttgatgatccgaatgctccgggctattttcctgatgttgacgatctaccgatagttgattctggatctggcaattcggattacttcgaagattatctacctattaaataa

SEQ ID NO: 197 - DNA, 4203 bp, Artificial sequence
  Synthetic polynucleotide or polypeptide
atgaatcaaacagatgtgataaatgcgattcgagcagcggagatagagggaataaaaaaggtgcgagaaaagtatcctgatagggaaatatctaattttcctaatagcgatattgtagtgtcgaatgaagagttacaagcaacgctaaagtcacttaatgggcatctctataccggtaccttggaaacaaacagggtcgaaaataagtatccccttcggcagacaccaagttctgacttgcgaaataggaatctttcagagtggcaggatctatgtggaaatgtgaatccacagcagctaatagatatagatgttgaaaccggactaactgcagctgctggtatagcatgggctgtacttggtatatcaaatccggtaggatcagcaatagcaggaatcgcaaatgtacttattcctattctttggccaactgaagttgaagatccaaatgtggtgtggcaatcaatgatgaataaagtggaagctcttatagacgaaaaactaaatcaactggtgagaagcatggctatagatcatttaaatggtttaaaaggacttattaataattataataatttagtttccatattaaatcaggatcctactaattcagataagcgagcggcggtactcgatgcatatagaggtttggatagagagttcattaggagcatgcctcattttaagacagcaggatatgaaacactattattacctaactatgcggaagctgcgaatcttcacctgctttatttgcgtgatgcggtgaggtttggctctggatggaatatgcagcaatgggagattgattttaattataaaagtttaaaagaccgaatgcaggagtataccaaccattgtgtgaattggtttaacaccggtttaaagaggcttgacccagcgacaaatacaataaattacaaacctgccaatatgcaggactgcacaagatacccatggattgcctatagtcaaagattttttgatagtcagaatcctcctagtgagtgttctcccgctctcataacaaatacatacaacaaacaagcaagcgaatatcacccagaagaaaattctaaaatatcttcttatagtactaaccgggagtctaaaggtgaataccaagtattagaaaattggaacttatataacgatttcagacgtgacatgacaattatggtattagatatagtatctatatggccaacgtatgatccaagactatataattatggaataaaatcagaactcacacgaatgctgtatactccaatacgtggaacaacatatagaagtgattcgactcaaaatacactaagcgcgatagagaatcgtatgattaaacgcccaagcctatttacttgggtaaattatctagagcttaattcattcaaagtcgaaacatctgcaggggcatggacagcgggtaatttgataactcacatagaacaagaattcctctacaccttaggtactcactggagagaacggcagggacaaaaagcagcaaacccaggaattcgtttttttacaaatttgttaacaaatcctatcaagtggttcgaaacacgtcaatggtttgagcctcgacagtttttggtctatcgacaaacttttgagggaggtttagggtcagtagaagagagaaatccttacttcactcagaactgtggattgacatgtgaaatagttgagccttgggataaaatctatgttccatcaatccgaaagagccagatacccaaagcagttgatcccactaatccaaacgctccaagttctgagtggaaagattcacacaggttctcgtatatgaaatatgaaccaatacgcaacgatgcacctttcgcatatccccaacaaggtcagataggtgctgtagcattcgggtggacgcatatgctggttgatccaaacaatacgatagcaccagataaaattactcaaattccagctgtgaagggatacttgattagtggaggggcaagaatcataaaaggacctggtattacagggggtgatttagtagagctacctcttgaaaattctgcgatcaaagtacgcttgactccacctcaagatagggaacgggattatttaatccgaatccgttattccaatcataaggagggttacatcaaattcaacgaaacagtaaatggtacggaattattccctggtacattgaaaataaacaagacaactctagccggttcaatatcattatcacaccaagatttccaatataaggaaactcaggcacttacaccaggtggaaacggcagtacttatgaaattgagataaaaaacattgatagcaatatcatcatcgataaaattgaatttattccttttacagttacaggatcattagaagcatatgaagcgcaccaaaagctagaaacggcaaggaaggttgtgaacgccttgtttacagatggtgcgaaacagcgattgaaagaacagatactcggttctgatataaatctagcgatggatatgattgaagaaattccagcggactggtttcaaaaagaaaaaatgatcctacgggatcgtatcaaacatgcaaaacgtctcagtcaatctcgtaacctcttacagtacggaaattttgaatccccagattggtcaggagacaaaggatggcgcattagtagagatgcttctgtagaatccgcgcatccggttttaaaagggaactatctcaatctaccaagtgcccgggacccgttgtccgacggtaccgtctatccaacctatgtctatcaaaaagtagatgaatcacaactaaaaccgtatacacgctattggatacgcggattgattggaaatagtaaagctttagaactggtggtatcacgttatcgtaaagaagtacacaaaacactaaatgtgccagataatctggacctgatgtccttgcgcagccatcttgaatccttaagcggttcagagattcttgggaaagtgcgagaaacattacacgatatatcttgtgggctctactcaccactggtttcagccaataatggtgaagacccacatctattctcttgccacattgatacaggagaacttgatttagacaataatccagggattgcggttgcattgaaaatcaactcggtagacgggggcgcacagattcgtcacctagaaatcatagagggcacaccattaaataaggaagaaatggcacgtgttaagcgtcaagaaaagaaatggaaacaaaagagagaagagatgtgtaatcgagatcaaggcatgattcatgccgcacaagtatcggttaaccggttatttgtgaatcaaacatgtggtcgcttgaagctagaaaccacgttacaagatattgtctatgcccaaacattggtaaatgagattccggatcgatataatgcgatcattgcggaattaccaggattgaatagggatatctttagtcgcttgcaaaatcaattagaaatggcaaatggattatacaatacccgaaatgttgtcgtcgatggcgactttatgagtgggcttgccaactggaaggcgaccgaaggtacagaagtacaacaaatgaatggtacatctgttgtggtgatttctgattggggtgccaatgtatcacaagaactctgtgtaaatccagaagagggctatctgttgcgtgtgaccgcaagaaaagaaggtcctggaaaaggatatataaccatcagtgattgtacagaagacaatacagaaagcctgacatttatattggatgaagaacggaaggggtctaccgaatcccttcgcgatacgtatataaagacagaaagtacgggggaaacgccgtatgtaggtggcaacaatacgatgaatgtgccatttaatcgatacgcaggaaatttccgcccgggtaataacacaatgaactatcaatcagaaagtttcggatttcatccatatgataatcaaaatgcttcatgcaatccgtatgagatgaacgcctattctaatcctatcaacatgcctacttattctgtagataattatggaacagagtcctatacttctcctatgacagcacaaaataattcgttcctttctggttatataacaaaaacggttgaaatcttccccgaaacaaatcgcgtacgaatcgaaataggcgaaaccgaaggtacatttatgataaaaagtgtagaattgattcgaatggagtgttaa

SEQ ID NO: 198 - DNA, 2625 bp, Artificial sequence
  Synthetic polynucleotide or polypeptide
atgcgtacaaataatatcatgaagtgtgtcgctaccactgcattatgtagtcagcttttgacatatgctgatgtttcatatgcagcggaggaacaatcacataccaaaataaaacaagaaatgcactctgagaaacaatcacaagaatctaatgagtccttacaaggattactgggctactattttcaggatcaaaattttcaacaactcgctttaatggcacatagacaagcttctgatttagaaatacccaaaaatgaagtgaaggatttactatccaaagagcaacaggatattcaatcagcaagatgggttggttacatcaagccacccaaaacaggagaatatgtgttttcaacttcttctgatcaacaggctgtgatagaactagatggaaagtcaattctcaatcgatcttctatgacagaaccacttcaactagaaaaagataaactctataaaattagaatagaatatgtaccagaagctgtaaatgaaaaagagactcttcttaattttcaactcaattggtcgatttcaggcgctaaagtagaacctgttccagagaatgttttctcgttaccagacctttctcgtaaacaagatcaagagaaaattatccctgaaacaagtttatttcaggcacaaggagaaaagaacaaagtatctcgaagtaagaggtccttagtggcaaatcctctattagatacagatgatgatggtatttacgatgagtgggaaacagatggatacacgatacagagacaaatggcggtgaaatgggacaatgttatgaaggatcgaggctacaccaaatatgtgtctaatccctataattctcatacagtaggggatccgtacacggattgggaaaaagcagctggacgtattgacaaagctgtaaaatcagaagctagaaatccattagtcgcagcctatccaacggtaggggtgcatatggaaaaattgattgtatccgaaaaacaaaatatatcaacaggactcggaaaaacagtatctgcttctacgtccgcaagtaatacagccgcaattacagcaggaattgatgtcacagctggagcgtctttattgggaccttctgcaagtgtcactgctcatttttcttatacgggctccagtacatccactgttgaaaatagctcgagtaataattggagccaagatcttggtattgataccggtcaatctgcgtatttaaatgcgaatgtaagatactataatacagggacagcccccatctacaatgtgaaaccaactacaaactttgtattagatggtgattccatcgtaacagtgaaagcgaaagaaaatcaattaggagatgcactaaaagcaggaggggtgtatccagaaaaaaatttagcccctattgcgctcaatacattagatgattttggatcgcagcttattcccattaactatgatcaaaccaagcgacttgaaaatggaaataaattaaatctacaaaccacacaggctagtggattatacggcacgattaaagccaacgggggactaagtgtagacccatcacaagagtgggaacctgttcgagcgcaaattgaaagtgtatcagcgggtattgtgttagatacaggtaccgaaacattagaaagaagagttgctgccaaagatgaccgtgatcctgaagatttaaccccggaactttcacttggagaagccattaagattgcatttaatacgactgaaaaagaaggtaaactgtattataaagatacaccacttgatgaaaatctagtagggttaatatttgatgaatctactgcgcaagaggttaaagtacagttagataacatgccagagccagataaaaaaatctacaatgtgaaactaaaacgcggtatgaatatcatgattaaaaagtctatttggtatagtgattttgatacgcgccaacacaattggcggaatgtactatccgctccgggacagggagttacagggaatgcgggaaagattcctaaagctgtgggtgtgggtgcggatacggattgggcatcgttaaaatatcaagaattagaagattttaaaaaattaaaacctaatacaatatatcgcctaagtgcatctgttaggtatccgaatttagagcctggtcgactagccagtgcatttacaggagtaaatacccgttcaatggaagaggctgttgttcgctcaaataaatatgaacgaataggaattacatttaactcaagtagtaatccaaataacatcacggatctacaaattgattcatccggaacccgtgatatgctgtatgatgatgtcacactggtagaattacgaccatccacagaaggtgaaaaatttgggaaagttgagtcttattttcatacaagtggtcagtacatgtttcttaaaatacaatatgggttacctgaagtagaaacgtttgaattctttatgaatggaaagaaaaaggcagattggacagcaaatattcctgaagaaggcgtgacaaaagaggatgtaccgatctttcagttgagaatcagtcctgaggaggcaaaaaatccaaataatacatttgagatcaagtttaaaggtgatactttagtaaatttcaagggtaatcagtaa

SEQ ID NO: 199 - DNA, 1188 bp, Artificial sequence
  Synthetic polynucleotide or polypeptide
atgaaagattgctcaaatgaagacttgctcgcaagtctcaatgtacaacaggattgtgcttgtgtacaaccgactactattaatccaaatgattttgatacagagttgctcgcaagcctcaatgtcaatccagcttgcataaaaccgacagatattgtaaaaattacacctgtatttattaatggggaggttatgctccagatacaattggcaaatggttccttaattgtaacaccacaaaagcagtctcctatctctttacaaactactgccgatgtacccaatctcccatccaatccgtacgaaccttggccgtcagaaagctacgtcaatacaaatacggccgatccagattctggcggcggactaatagagtatgtatatttagcagtcacggctactctagatgcaggagatacaagcatttacaaaaatatacctggctcaagcagtggtgggataaatcccttatacaaaggttatggtcctatggaagtatttagaacggattttactgctgtcgtagatggccaaacatacgactcaccagcaagaaagaaaggcgatttggtttgttatataggacttataaaagaaactaatcctatagcaaaattagtaagcccgcaagccagagcaaagtgggaacttctccctgatcataatttagtgaatagaaattcatcaacacagtggaaacatactgtatctactggtgttcctgccactgagtatgcttctatggggtttcaattaggaacagaaacttatcaaggagctgatcctttaacttttaccaatgtgaaaaatgctgttcgtaacgcatttggtgacattattacaatggtatatgactatcaaaaacaatttgattttagtaaaccggggccgaattactcttacaatgattataggactggcgtttatcagctactaattaagtatacgtatctcccttcccttgaactttcatttagtatacttcggtggaatcgatatacgtatagtgactatataaacgatgttttaaatgaccctaatgataccaagattcctgaggtaaattatagttctgtagctttatcacaggattactattataagacttctactttatgggcagccgcaacaccaggatcacaatcacgtgtaacggataattctcaatacaattcacaaactttttaa

SEQ ID NO: 200 - DNA, 1074 bp, Artificial sequence
  Synthetic polynucleotide or polypeptide
atgccttgtaatcctagtgattataattcggacttgctcgtaagtcttaatacaaaaccggcttgtgtacaaccgaccgctattaacccaaatgagtttgatgcagcgttgctagctagcctcaatgtcaatccagcttgtttaaaaccgacagatgttgtaaaaatcacacctattttagtgaatggacaagtgattttacaagcacaattagccaatggatccttgattgtgacttcacaagagaatgcgtctattgctttaaatacagataatctacctactatcccatcaaatccttatgcagcgtggccatcacaaggaaatgacgccattggaaatgatgtaatcggaaacggtttaaacttaatagactacgtatactttcaattaacactaaaacaagccgctgatcctgaattaactcgcctagtgggatccactccctctggagataacccgatatataaaggttatggtcctatgcaaatatttagacccgattttacaatggtacaatttggagaaacataccaaccaaccgcacagtatcccggggatttactttgttatataggacttatggttcctcaaaatgcttatactaccaatttagttacattccgacgagatatttggaggattttgcctgataatagtttatatagtcgaagtatagctgctagatgggaccatcctgtttcctttggccttagcacttccgagattaatcttatggcttttgatttaggaacaaaggtatatcctaattctcccgccactacttttgatagattacaagcagctattcaatctcaattcggagatcaaattagggctgcttccacgcgtgaaaaagaatttaattatactaagccaggtcctaattatccttataatgattataaaattggcgtttatcaaatgcaaccatattatggttatcgaccatctacacaactttatagtaaacttttagagtggagcgtttacacaaatgctcagtaccaatacgacctcgtaaataatcctaataatgttgtactgcctaatgaccactggataacgtactag

SEQ ID NO: 201 - DNA, 1368 bp, Artificial sequence
  Synthetic polynucleotide or polypeptide
atgtccaatcaacaattagtgaatttacgcattgattttgcttttaaacaattatttggcacaagtggaaatgaagatatacttattgcatttttaaacgctctgttgcaaggttctttagaatcccctattgtttctttgcaattagaagacccacacttgcaccgagaacatgaagaagataaattatcgattttagatatttccgcaacactagatacgggaacaaaggtaaatgtagaaatccagctaaataataatcatgacatgattaagagaagtttatattactggggaaggctatacacatcccaacttcaaaaaggaatgccctatagttctcttcataaaacaattacgattaatttattaaactttgtcatgtatccggaatatgaagcattccatacaacaggaatcttatggaatcaacaacaacagaaaatattgagtaatgatattgaagttcatattgtggagattccaaaactcatgcaacagtggcggaatgaacaagtaaatccctgggaagattcatttgttcgttggttattattacttccagcgaatgaggatgaacacttaacccaaacattggaggatattgcgatgaaccaagacccgatcttacaaaaagcaatgaataaatgggaacgtatgagtcaagattcttctttccgacaagcttatgaagcaagagaaaaggcgttgatggatgaagccgcaaagtttgctcatgctcgtaatgaagggaaaaaagaagggattcaagaaggggttcagcaagggaaaatacaaatgattaaaggtatgcatgaacttggtgtaccaattgaaacgattgcaaaagcaagtaaattaagtatagaagaagttgagcttatcattgcttttttaaatgcaatgttacaaagttctttagaagcgcctattgtttccttacaattagaagacccacacttgcaccgagaacatgaagaagataaattatcaattttagatatttctgcaacattagatacgggaacaaaggtaaatgtggaaatacagctaaataataatcatgatatgattaagagaagtttatattactggggaaggctatacacatcccaacttcaaaaaggaatgccatatagttctcttcataaaacaattacgattaatttattaaactttgtgatgtttccagaatatgaagcatttcatacaacaggaatcctatggaatcaacaacaacagaagatattgagtagtgatattgaagttcacatcgtagagattccaaaactcatgcaacagtggcggaatgaacaagtaaatccctgggaagattcatttgttcgttggttattattacttccagcg

SEQ ID NO: 202 - DNA, 2205 bp, Artificial sequence
  Synthetic polynucleotide or polypeptide
atgaaactaaagaatcaagataagcatcaaagtttttctagcaatgcgaaagtagataaaatctctacggattcactaaaaaatgaaacagatatagaattacaaaacattaatcatgaagattgtttgaaaatgtctgagtatgaaaatgtagagccgtttgttagtgcatcaacaattcaaacaggtattggtattgcgggtaaaatacttggtaccctaggcgttccttttgcaggacaagtagctagtctttatagttttatcttaggtgagctatggcctaaggggaaaaatcaatgggaaatctttatggaacatgtagaagagattattaatcaaaaaatatcaacttatgcaagaaataaagcacttacagacttgaaaggattaggagatgccttagctgtctaccatgattcgcttgaaagttgggttggaaatcgtaataacacaagggctaggagtgttgtcaagagccaatatatcgcattagaattgatgttcgttcagaaactaccttcttttgcagtgtctggagaggaggtaccattattaccgatatatgcccaagctgcaaatttacatttgttgctattaagagatgcatctatttttggaaaagagtggggattatcatcttcagaaatttcaacattttataaccgtcaagtcgaacgagcaggagattattccgaccattgtgtgaaatggtatagcacaggtctaaataacttgaggggtacaaatgccgaaagttgggtacgatataatcaattccgtagagacatgactttaatggtactagatttagtggcactatttccaagctatgatacacaaatgtatccaattaaaactacagcccaacttacaagagaagtatatacagacgcaattgggacagtacatccgcatccaagttttacaagtacgacttggtataataataatgcaccttcgttctctgccatagaggctgctgttgttcgaaacccgcatctactcgattttctagaacaagttacaatttacagcttattaagtcgatggagtaacactcagtatatgaatatgtggggaggacataaactagaattccgaacaataggaggaacgttaaatatctcaacacaaggatctactaatacttctattaatcctgtaacattaccgttcacttctcgagacgtctataggactgaatcattggcagggctgaatctatttttaactcaacctgttaatggagtacctagggttgattttcattggaaattcgtcacacatccgatcgcatctgataatttctattatccagggtatgctggaattgggacgcaattacaggattcagaaaatgaattaccacctgaagcaacaggacagccaaattatgaatcttatagtcatagattatctcatataggactcatttcagcatcacatgtgaaagcattggtatattcttggacgcatcgtagtgcagatcgtacaaatacaattgagccaaatagcattacacaaataccattagtaaaagcgttcaatctgtcttcaggtgccgctgtagtgagaggaccaggatttacaggtggggatatccttcgaagaaagaatactggtacatttggggatatacgagtaaatattaatccaccatttgcacaaagatatcgcgtgaggattcgctatgcttctaccacagatttacaattccatacgtcaattaacggtaaagctattaatcaaggtaatttttcagcaactatgaatagaggagaggacttagactataaaacctttagaactgtaggctttaccaccccatttagcttttctaacggtaaagctattaatcaaggtaatttttcagcaactatgaatagaggagaggacttagactataaaacctttagaactgtaggctttaccactccatttagctttttagatgtacaaagtacattcacaataggtgcttggaacttctcttcaggtaacgaagtttatatagatagaattgaatttgttccggtagaagtaacatatgaggcagaatatgattttgaaaaagcgcaagagaaggttactgcactgtttacatctacgaatccaagaggattaaaaacagatgtaaaggattatcatattgaccaggtatcaaatttagtagagtctctatcagatgttctcttcaggtaa

SEQ ID NO: 203 - DNA, 2616 bp, Artificial sequence
  Synthetic polynucleotide or polypeptide
atgaattatcaattagaagaaaaacctttaattccttataatgttttatcttccgttgttattcctggtgaagcaactagtgtagatgacctgtaccaggaaataaaagagttttggaacgaacatggcgatatttcaaaagacctagtactaaaagcttggaatttttataaaacggggagcattggttatttagaactcaccaaaactcttatatcacttggtacctttattccagaagtcggtgcatttgttccctatataaataagttcctggacttcgcatggcccatagtctttggtggaggcggtacgaacaccccgagtgtctttgaacagctgaaacctcaaattgtagaattaattaaccaacaattaaccacaaatcaacagaactttttagaccaagtacaagcgggcatacaaaacgctatgtccacttataacaatgcagtaaacgtctatcaaaagtcacctactgaccaaaatcgtaacgacctacacgctgcagttattgccatacaaacgtacacgaacgggcaactacctttgtttcaacaaaaagattatgaaattcttgggctcccctatctagctaacatcgtcacgatacaattactgacattacagaccgtaatacaggccggtagtaaatggggatatgactccgctagcgtagactcccttttaaacggcactaatggtctaagagaccttataacaaggtacagtaaatatattaccgacacaattagtgcctacgtaaattcatccggatttacgtcgaaaaactggaatgatcagaaccaattttggcgacaaatcaccctaacatgtttggattatgttgcactatggcctactttagatccgaccgtttatacaggggaaatagatctcgatcaaacgagagctatattatctggttataataatgcaaatccaagtaatgctagcctgggagcccccccctcacggccggttgcatacctgggtgaactggctaagttacaattctcggcttggcacgataacaatgccacgtttgaatactttataaatgggatacagcagcaaatcatagctccaaatgggaatacgaatgtttataatacaaatggtgggtactcttacggaagtgacatcgatatcccttcctcaaaccccgctgtttccacgcacttaatatacgggcaagctaataaaatcaaaagttctactttttatatgacctttgcggatggcacaacaacatatagagatttttaccctaatctcggtcatggaacgccttacgaggatgcaactcctacggctccggctggtcataaactgagtagaattattccaacttatgcagatcccttttggagctatgtgaatgcatatgtatacacagacctacaagcacaaaatgtgtttggatttgttaattcagctggaaacgccagcacaaaaggaattccggtggaaaaaggaacactgttatctggagatccactcacagtgttggaagagcgggtgaatggggcaaatattgttcgtctcgatcaggggcagattcttcagatgaaatttaagaatatgacagctggtagttataaagttcgattacggcatgcgaataatcctgggcaacaaatctggttctatttaaaggatgacgcagtaggtgttaatcctattatttcgaaccaaaattactcatatgacttagatccgaatcagggacttgtggtatcagggcctaacaattatggactcactacatttggggagtttactattgtgtcaggagatgtggaagtgcgacttcaaaatacatctaataactatatgataattgatcgaattgagtttgttcctgttgcaataacgccaatagaaaatctgaactatccgatttattcaccagttcctatagacaataatccgcagtcaatggatatattcccaacaatatggaaggcaggctcaggaacagtggggattggtgctactgtatttccatatagtactgatggtccattgttcctttttgctaaaactagtcagggcaatgactcagacccaaggaattggaacaagatgtgctattatactgcatcccaccaggttcagtctattatgcggactaatggtacgtacatttttggacctatctcgagcgaaggttgcgttaatggaccgttcacagcattaaaaatagcatctgtctatacagaggttacaactggaacaattgctggtacagtaacaacgcagcaagcaccgccaccgccgccaccaccaccgccgccaactgattgtacaccgcttgcacaacctgctaacatttctttaccaaatggttatttggttcgtggccctgcccaaactatttggaatggttccggttcttgtgcgaattacgtcaatctaagcggaagacactcgggcccaccactgaccattcgatatttgaagaatggtgtaaaagtgaaagaagacagtacagctaatgctaccttcgaatttaaatatcctgtttcaccatttgatcaaattcagcttttaggtggaaatatcactgatccagcaactggagatatgagtggtactgtttcctggcagtaa

SEQ ID NO: 204 - DNA, 1080 bp, Artificial sequence
  Synthetic polynucleotide or polypeptide
atgaaaaagtattgtaatcccaagaaagtaaatcctaatgaagtgaatccaacagaatttattttatttgacttggatcagtatctacatcatactgtgatcaacgtagctttggacccaataaatctgaactttatgtccagtggtatgaaaccatcaggtgggtggcattttgatggaagttacattccttccccactgtctagtcaagtacctaatgcctgccaacaacaatatccagaaaattatccctatggcaattgtaggtatcaagcatataacgggactgattgggctccagatacatccgctttaatcgcagaagggacagatgtatatgaagaaatcgaatccatggctatagaaacccctattattgcggataaacatgaatatcataataactcatctttagaacaatcctatgtgacccctgcctattcagaaacagtgactacaaccacgacaaatacaacaacacacggatgtaaagtaaatccaaaaatcagttattcgcgtaaatcgaaatataaagtcaagattaaggatttagaaaatggatttaacctggaattaggggcagaatataacttcagcaatacaaacacaaacacgtctacgacaactcggactgtgactttcccatcatttacgacaaaagttcccccctatacaactgcgattgtgacagtcgtattaaacaaaggaacgtatgccaattataatgttccagttcaaacgaatttatttgggagatttctcgaacacaacgtacatatggatatgagcgtaccgggatcgtactattatctagatctatatccttgcgttgaattagttcgaacatgttgtgcatcatcttgtagtgaatgtgtgacagacatggttcagcttaatcctaacaatgctacggttcgttttaatggaacagggtcatttatagcggatgttgcatcaaataactttatcgtaaatactgattttgtcgacaacgaaacaggagcaaccgtttcgagaaaaacagagtacgtacccgctatttacggaccccctactacaacagtagccacatctaaatag

SEQ ID NO: 205 - DNA, 948 bp, Artificial sequence
  Synthetic polynucleotide or polypeptide
atgaaaattcgactcaaacaaaaaaaactttttctaatgactttggggatcatgctgggtttgtcaagtaccatgttttttggaagtaatgtcatagctgctcaagatgcaaacataacaaacgtggatgcgcaaatggacaaaatttcagatttttattttcaaaatgagctctatagaaaagatttgcctgaatatcctggagcgtatcattatcttagattggatagtaaaaaaacagatatggacttagacttaaaaacaagtgatttaaaaaatatgacgtatagtgatttacatccagaatatgttggtgaaaatgaattcgataatacgcatagcgatatagatcaaacattcacgacagcagcttattctcatcaagttacaaattccgctagtacgaatgtttctgaaggatttaaagtaggaggaaaaagcacgattttcaaattgcctattctcttaacaggtggcattgatattaccgcagaattcaattctgcaacgagtacgacaaatacagttacagatactaaaactttaactgcttcaccgcaaaatattaaagtgccagctggtaagaaatatttggttacagtggatatggcaaaaaagtcatttagtggagatgtagactttactgcaactgggaaaaatgtgaaatcaaaacttgacatgttagcaacttattatgggccaggatttccacgcccaaataaatatccatcacttaccttcgcaacagctgatatgtggaaaaaattatcgaatagtcaacaaagtcaagtaggcggggtgaaatttgattcgggtaaaaatcttgtattgaacgggaaagcaaaggtaaacggaattttcggaagtaaactgcgcgtaagcgtttatgatattacggattccaaattatctcctaaacctgttcagcagaaattcatagagcaatga

SEQ ID NO: 206 - DNA, 963 bp, Artificial sequence
  Synthetic polynucleotide or polypeptide
atggatagagaaaaaaaactaattcgcaaagctttagttatatccactattgcgtctatgggaatatccttagcaacagtatcaccaagtttagctagcgcagatcaaattaatgtgtcacaaaaagaagtaagaacagataccgctatattagattggaaagagccaatctttaatgccacagaaatttatgggaaaaacattggtggaaagggttactataagtatactgattcctttggttataggcagggtaatggtacttattatggtgctacttttcaacaactttcagtagaagcagatggttctcctattattactaattcaaaaaatatttttgtaggaaagacaactttaactaataatacagatcaagaacaaacgttatctacaaatagtttctcaaaaatgatttcaaactctattgcccattcgactactcacgggtttaaatttggaactaaggcttctgcaaaatttaatattcctttggtaggagaaacaggaatagaattatctgctgaatataatttttcagatacatctagtcaaacaaatacggaaagttacacttatactgctagtccacaaaatattaaagttcctgcccattcatctgtagaagttattgtaacttctacagatgaatgggcaggtaaagatgctgagaattttatatatgctgatgaaccaaacgggaaatacggtacatcatattggtatgataagccattctatgaaatagtaaaatatgcttcatactttgaaaagcttcagaatatagctcctaattcagatggtcaaacaataaatctaataggatctggtaagtatgaagctgaatatggaacagaatttactgtagatgtaaacccagttgataaagataacgtagctaaacgaagtagtaatgaaggatacacatacaaagtaaaaccagaaataaaaaaagaaaattaa

SEQ ID NO: 207 - DNA, 1887 bp, Artificial sequence
  Synthetic polynucleotide or polypeptide
atgtcaattccgctaggaatcttttgttcttttttcatatcccactctttttgcaccagaacccaactttggcaattcatactggggaagctatggcctgcagataatagtcaatgggaagaattcatgagacatgtagaagaactcgttaacacaagtatagaagtacgtgcaagacagcaagcacttgacgaattaacaggtttatctaatattgtagcatcatataaccgcacgctcgcagattggaaattagcacaaaacgattcccaggcgaaagaacgtgtaagagacgcctttagaaccgtcaataccttttttgaacaaagaatgcctctattttcttcaaggaactatgaagtacccttattaacagtgtatgcacttgcagccaatatgcatttacttttattacgagattcctctatttttggaataggctgggggttttctcaaaaggaggttaacgacaattactgtgatcaattaagacttgcgaaccagtatgcaaatcattgcacaacttggtttaatactggtttacatagattaagaggaacaaatgcttctagttggatacggtataatagattccgtagagaaatgacgttaactgtattagatatctgctcattgttttccaaatatgattattatcaatacccaaaagaggtaaagtcagaacttaccagagaaatttatacggatccagtaggtgtgtcaacgagtacagtgcctggactcattcctaattggtttaatcatgcaccatcatttaatgagttagaacttgcactcattcggagtcctcgtacacttacttggttaaataaaataacaatttcaacaggtagattaaacggctggagcacatcacagaactattggcaaggtcatagactagaattttcggaaacaagtgcggggaataaccaaccaagtccaacttatgggacttttaacacttcagttgctcaacatagagattttaatgtattgaatagggatgtctacacaatggattcatatgcagtatcacaagtttttggtactagtacagctaccctttttggagtttctgataatgttttccaataccaagaccttaatagtaatttcccagggacactgaactatacaaacccacctagttggggtggacttcacatttattctgaattaccagcgctaccaacaacacctggggtagaaccaggaaggccaaccgctaacaattatagtcacagattaacgtatttgacagcttctcgtgcggggactgctggacatgttttgtgctgtggctggacatcttcaactgttgaccgtaacaatagaattgatcccaataaaatcacacaaataccggctgtgaaagggtataaccttggatctgcaactgttgttgtacgagggcctggtcatacaggtggagatctggttaaatttgattattttgaaggcggcctaacgataaattgttattttcctcaaccactaaattatcgtatgcgtattcgctattctgcaccgaataatagtgcaatgtatctaaattcatctcatgtagcgagtgtatatattcctttccccagaacaaacattatagataacgtacttgtagacccgatggtttatggtgcattccaaactgtagaagttcctgctcgtttccgtgcaaataatgtaggaaatgcaacatttacatttagactacaatactctcaaaatccgatatatattgacaaaatcgaatttatcccagatggtaccccaattaaaaaatgcacatgtaaatgtgtaggaatatattgcacattagaatgtacagaatcacgctccttaacaacagaaaaagaaattgtaaataatttatttatcaattaa

SEQ ID NO: 208 - DNA, 2580 bp, Artificial sequence
  Synthetic polynucleotide or polypeptide
atgaagaagatattgtatagcctcgtcaatcttgttgctctaattattctattggagcctactgtgggttttgcggcagcagataccacaaggccaacgatttcaggtgctacaaatactacggtttatttgaatcaaactttcaatcctaaaaaaggtgtcaccgctaaggataatgttgatggaaacatcaccagtttgattggaatttcaggtaaggtcgataccaaaaaaattgggaaatacacgctgacatataaagttaccgacacagcgaagaatgccactaccgtaaagcgggttgttaccgtcaaaaaggacactactcaaccaaacatcactggggccactaacaaaacagcctatcttggatattcctttgacgcgaaatctggtgtgaaggcgacggataacgcagacggtaccattacttctaaaatcaaggttaccggccaggtaaacacaaaaaaagaaggaacctataagctgaaatattctgtgacggacaaaggaaagaatacaagaacggttactcgtgttattaccgttaagaaggataaagaaaaaccgaaaattactggtgctaccaacaaatccatttataagggatattcatttgaccctaaaacgagcgtaacggctacagacaatgttgatggaaacattacgagtaaaatcaccattagtggtaaggtcaatgttaacgaagcagggatatacaagcttcagtataccgcaaaagacaaaaccgggaataagacaacagtgacgcgtaccattacagtgaaaaaagatatgacgaaaccgcaaattaccggtgctggcgataagattatgaattatggaacgtcctttgatccgaaatcgggtgtgaaagctaccgacaatatagatggaactataaccagtaagatgacgataacgggtagtgtaaatgtccgaaaagtcgggacgtacaaactggtttacagtattaaggacaaaacaaataataaaacaactgttacacgcacgattaacgtagtcgataaagtaaagcctacgttgacgggatctggacttaacgatagaacgttcgcgattggcatttatgataatttcccccctttaagcggcggaatcacagcttatgacaatgctgacgggaaccttacctcagaaatcaaagtagagggcgaagtaaatgttgataaggctggaacatatactttaatttattccgtcactgataaatcggggaacaaaacgaccgctgaacggaaggtaacggtcatagacaatatccctccaaaaataagtggagctgataaccgaagagtcctttattttgaaccttttgatccaatggaaggggttacttcttcagataataatgatggagatctcacttccaaagtggttgttaaagctataggtgagacgttaaatacttcagatttatcactttcaggcactttcacatatgagtattccgtgtctgatgaagccggcaataccacaaccgtaaagcgtcaagtaactttaacatatcgagaagcggagttttttggaacagatgatgtgaaaataaatataggtgaaacattcgacccgttaaaaggggtaactgctacagattacgcgaatagagaagatgtcacctctttaattaaagtgagtggagatgtagatgtaaacaacttaggtacctatacaataatctacaatatttcagagaaaggaataaggtcgggaatttaccgcagagtaacagtcgttgataacatccctccggtgatcactggggtacgggattggacagttgatcaaaattctagcctgccagatttacttagatgggttgaggcaaatgacaacattgatggggatttgacaagaagaattgatgttgatacgcaaaacgtggatacttcaaccgaaggagaatatgtcgttacgtattatgtaacggataagatggggaatagggcagaaatccaatctaccattacggtcaagaaggttccagtgacagaagtaaaggtttctgatattaattacatcgtaaaaacaggacaagattttcacctgcatatcgatgcctacccaaaaaacgctagctttccagaggtcacttcttgggaatcttctgatgaaactgttgcgactgttgatgaacaaggtcacgtaacagccttagcggacggaacagttaccattaccgctacagtggatggtatcaaagattcaaccacctttaccgtttctgggagacctgatctccgtttctttaccgggggatgggaagccgatcctagtactgggtatctgcgaattgacaaaatggatttcgatgccattaatgatggaaatgtgccagtcactatagatagcgtaaaagtttacgatcctaatggttcttctccagaagaattagttaagttggattctgtaaccagccttgcaccttcatccaggacgaatgtgaacatcgattttaaagatgggaaaggcccccttataaaaggtggtaagctttctatttttgctacaataccaaacggtaacacctatgaatattcaataacgttcagagactaa

SEQ ID NO: 209 - DNA, 2751 bp, Artificial sequence
  Synthetic polynucleotide or polypeptide
atgatgaaaaataaaaaaagaacagctacagttgcattaacaacaggattagctttaacagctgtaataccatatggagtaggtcatgcagaggaaacagatcaattacaagttcaaattcaggaggattcgttccgtacaggtgaacttacacaaccatcacaaaaggcaccagagaatgtagtaaaagatgcccttaaggaaaagacagagcaagctttgtctccaaaacaagtgaatggagaaatgggagtagattataaggttcttcaaaaacgcggttcgtatgatgggactacacttgtgcgtatgcaacaaacatatgaaggaaaagaagtatatgggtatcaattgactgcacacgtagataaaaagggtgttattaaaagtgtttcaggggatagtgcgcaaaatttaaaacaagaagatttaaagaagcctattaatctatcacaagaaaaagcgaaacaatatatttttacgaagtacgggaatgatatcaagtttatttctgagccagaagtaaaggaagttatttttgttgatgaaaataatggacaagccagtaatgcataccaggttacatttgctgcagtaacaccaaaatatgtatctggaacttatttagtgaatgctcataatggtgaaatgttaaaaaatatggtacaagattcagatttaaaagcaagtgagaagcttgttgatgccttagaggaaagtagaaaaagcaatcttgcatcattaactggaacaggaaacgatgctttcggtatatctcgtacatttggtatttctaaacaaagtaatggtgaatatgcacttgctgattattcaagggggcaaggaattgaaacatatgatgtgaattacagagatattactaaagaggaaagctattatcctggcacactagcaactagcacttcaacaacatttaatgatccaaaagcggtaagtgcccattacttagcgacgaaagtatttgatttttataaagataaatacaagcgtaatagttttgataataagggacaaaaagtagtttcagttgtacacgcttgggattctgaggatacgaacgatccaaaaaattggaaaaatgcattaagtgctaatattaataatagtagtatgctcgtatatggagatcctatggtgaaggcatttgacgtagcgggacatgaatttacacatgcggttacatctagcgaatccaatcttgaatattccggagaatctggtgcgattaacgaggcgttatcggatattatggggacggctattgagaaatatataaacaatgggaattttaactggacaataggagaacaaactggattagttttacgtgatatgaaaaatccatcttcaatcaattattcaaatggagtaccatatccagatgattatagtaaatatactaatttaaatggagaggatgatggaggcgttcatttcaactcaagtattattaataaagttgcatatttaattgcaaaaggtggcactcataacggtgtaactgtaaaaggtattggcgaggataaaatgtttgatattttttattatgcaaacactgatgaactaaacatgacttctgatttctttgaattgagatcagcatgccttcgagttgcaacaaataaatatggcgcgaactcggctgaagctcaagcagtccaaaaagcttttgatgcagcaaaaattaaggtaacagtggaagaaaaagaaaaagctgtggaaaaacaagcgccggagttaactgtaccgtttacaactacactacatgtaggtgatacgttcgacccgatgagaggcgtaaaagctgttgataaagaagatggtgatttaacaaatagagtaaaacataaaggcgatgtagatacttctaaaccaggtaactacattgtggagtactcggttgtcgattcccaaggggttaatgcaacggctacacagactgtaattgtagaggaaaatggagaaactccagatatggaacctaaattaacagtgcctgttggagcaacaattaatgtaggagattcattcgacccaatggcaagagtatcagctactaataaagaagacggtgaccttacttctaaagtaacagttgatggtaaggtagatacatctaaggccggtacttacgtattaacttacacagttacagacactaaaggtcatgaagtaactgcgaaacaaatagtaacggttaaagctggagaagaagttaaagatgaaaaaccagtactaaaagtacctgctgaaacaacaattattgagggtaatcaattcgcctcaatggcaggagtatcagctactgataaagaaggtggtgaccttacttctaaagtaacgcatgaaggaactgtagatacatctaaagccggtacttatgaagtaatatatagtgtcaaagattccgcaggtaataaggtaactacaatacaaaaagtagttgtgaaagataaggacaatggtaacggttctaataacagaaataatggttcagacaacgataacggttctgataatggcagtactggtactaacaacagcaatgcctctgatactggtaacagtaatatctcaaacaatagtactactgataaaaaagaagatacatataaagagcttccaaaaacgggtgcaagtacaaataacagtgcagcaatgggtgtattgatggttcttgcaggtatggttctttcttttggtcgtaaatttagaaaggtattaaaataa

SEQ ID NO: 210 - DNA, 3978 bp, Artificial sequence
  Synthetic polynucleotide or polypeptide
atggtggtgaaattgagtatagcaaaattgtcagattatcgcatagaagagaaaacgattggaggattgtctatgattcaaaatgataacagcagtgaatgtgaaataatatatagtggtatcggatatgattcgccaaagtacccactcgcaacggatccaggctctaatttacaaaatatgagttacaaagattggatgcgtatgtgcgcagatggaacagtgctggcatcttcttcaagctctgttcgagacgcagtgattacagggacggcgattgtaagtactttagtaggtattgcatttcccatagctggagcggcaatagggattctgtcatcaattttaccatttttgtggccggaggatgcaggagcacctgggactatccaagcacaatttacatggaatcaattgatgaatgcagcggaagaactcattgagcaaaaaattttagatttagtaagaagagatgctattgctacattacaaaaattacagtccagtttacgagactaccaacaagcaatttgcaatttaaaaatggacccaaataatgaactatataaagcggatgtaagaagagaatttaatgatgctgaagatcaggcgaaatttgctattattgatttgaagaaacaaggatatgagatcccgttattagcgagttatgcgcaagccgcgaatatacatttgttattgttacgagatgtggttcgaaacggaatcagctgggggttttcgccccttgaagtgcagcaatattataataatattacctcaaccggaaacccaggtatgttacaattactaccgcaatatacagattattgtgtaagttggtataatgcaggtgtatctaaattaagaattggcctaggtggggattatggtgaccgcgcatttcagtttaataggcacaatgatttcgaaagggacatgacgattcttgtactagatctggtggcagtatggccaacttataatccagggaattatggtagtttcggtacaaacatacagctgacgcgacaaatatttacgccagcaacggaaggtaatctaggacatctcagcaacatatacaggacgtttttgcctcgtccagatttatttagattcttatatctgttagatttccagactagaacaccttatgctctcccacaaaaccagctatgggatcgacagtataatgcgtataggctattattccataggaccttagataggtcagtggtgtacgaatttcgcaatggcacatacgacacctctggcagtaaccagtacagaagcgaaagtgtgagaccttattttgatgcggacatttatcgaatggtttccttagaaggttatagtaatcccgattttgaccggccccaaacatttagttttgatttgactacaggcgtatctagtaatgtggggattaattatgcagcgattgcgggagttcgaacaaggagttattctaatggtttggcctgtcgtccaatcgagaattctctttgcgatccttgtactactttttgtgaagtcgaagagaatataagtctcccttgtaacagccgtagtctgtatagccatcgcctttcatggtttggatctcctgacattggcttagctatgttggttgatgtccaaggctggacacatgtaagtgcagataaatcgaataaaatagacagggaaaatatcactcaaattccagttgtgaaggcttttggcggcgtaggttatcaagttataagggggcctggtagcacagggggagacttagtaacgataccacctaatgcaaaggtacagatccgagtgacaggagaactacaacaggattatatgctgcgctttcggtatgcatgtcagggggatggagaactattcgtatatagagaagttcgcactagtacggggatggctgcagacttttctcagtttagaagaatgttttcaacatattctggtggggacttaacatacaatgcttttggttaccaaacaatgttgactccgttactaggtcgctatgacacagattggtggataacgatcgataatactggaaatacaccgatcatcttagataaaatggaatttattccatatccattgccagtgaatgagacattaggaggatatgaattaggtaacaatttagaaaaggtaaggcagacagtagatgctttatttacggatgatgggaaacatatgctgaaattgaatgttacggattatcaagtggatcaggccgcaagactcgtagagtgtatgtctgatgaaatctatccaaaagaaaaaatgtgtttactcgatcatgtgaaatgtgcaaaacgactcagtcaagcacgtaatctattacattatggggattttgaatcatctgactggtctggtcaagatggatggaaaacaaatcagggggtatttgttgaatcatatcatccgatttttaaaggacgttatctcaatatgccaggtgcgattcaggctcagtttagcaatcaggtcgttccagtatacgcgtatcaaaagatagaggaatcgaaattaaaatcgtatacacgctatttggtacgaggatttattgggaatagtaccgaattagaagtattcgccgcaagatacgataaggaagtacacaagaaaatgaacgtacaaattgagaggataccaatgaatccatgcggcaatgaatatgtaaatgagatagtaaataaaattcaacatacaagtaagatatgccaaaatccacatgaatttgagtgccatattgatataggagagctagatatggcgcgaaatcttggtatttggattggctttaaaattggatcaacagacgggatggcgacagtagggaatgtagaagtaatagaagcgaatccattaacaggagaagcactcgctcgtatgaaaaaacgcgaacacaaatggaaacaaaagtggaatgaaaaacaaatgaagatagaaaagtctgtgcaagtggcacgaggtgcgattcaggctttattcacaaatgcagatcaaagtcaattagcaacaaacgccacattacagcatattgtagacgcggaggaatgggtacaaaacattccgtatgtctatcatccattcttagaagatgcgaaggtaccgggagaagcgtatgatatcttccaacagttctcgaatgccgttgcgaaggtacgggcgctatatgagcaacgaaatgtactgagaaatggagatttcaatgcaggattagcgaactggaacgggacagagggagcgaatatccagcaaatggggaatgcatccgtgctcgtgatttcagattggagtacgaatatttcacaagaagtatgtgtccatccggcacatggatatgtgttacgtgtcacagcgaaaaaagaaggttctggagaagggtatgtaaaaatcagtgatggtacggaagaaaatacagaaacactgaaatttacagcgggagaaggtacagcaagtgccacatcacctatgatgccacctcgagaatcctattatgagcaaaatactgggaaccgtgcctatgtaaatgggaatccgatgtcttatcaatcagaaagtttcggaatcaatccatatggtgatgagaataggatgaatacgtcatcgtcttatacaggaacagattgtggatgtggctgtcgtacaaacgcgtacgctggtgattatcctaccatgagtgatacatcaaatggatatgaaaggaatgcatatccaggtagcatacaccaaacgaatccaatgaaatcaagttgtggatgcggttgccatacaaaagcatccgtaagtgaaacaaatatgacgatgtacccttctgagtctctttcaggttatgtcacaaaaatggttgaaatcttcccagaaacaaatcgtgtatgtatggaaataggggcaacatccggcacatttatggtggaaagcgtagaattgattcgaatgggttgcgaataa

SEQ ID NO: 211 - DNA, 414 bp, Artificial sequence
  Synthetic polynucleotide or polypeptide
atgaaaaagaactttataaaaagtagagaggctaatgagtacatatataccgtaacagcagaaattcaatttgttaatggtaacaatgatcatcgagaaccctatggttggattgatatatatcaaaatgatattgttactacgctatggactcagccaaatgaaggaaatgaaacacccagggtttcaaagctgaaaacaagtgctgacattgtcgcagactctattccccatcagttatgttttagtggaaatgtgaaagagtatagttattgggggggagaggatatacttattgatccagataaacgaacatgtggtgtatggaatgaggttattaaactgcccgggatgggtaaggattgctatgtgagtttaaagtatcaaataaatttaaaatattatgataattag

SEQ ID NO: 212 - DNA, 1611 bp, Artificial sequence
  Synthetic polynucleotide or polypeptide
atgtttacaagtggtacgaaaaatacgttaaaaatagaaacgacagattatgaaatagatcaagcggccatttctatagaatgtatgtcagatgaacaaaatccacaggaaaaaatgatgttatgggatgaagtaaaacaggcaaaacaacttagtcagtctcgaaatttactccaaaatggggactttggagacttatctggaaatgattggacattcggtaatgatattatcatagggtccaataatcctatttttaaagggaaatttcttcagttgcgtggagcaagagacatatatggaaccctatttccaacctatatccatcaaaaaatagaggaatccaaattaaaaccctatacacgttatcgagtaagagggtttgtgggaagtagtaaagatctaaaattagtggtaacacgttacggaaaagaaattgatgccattatggatgttccaaatgatttggcctatatgcagcctagcccttcatgtggagattatcgctgtgaatcaccgtcccaagggtattctacaccagtaacagatggatatgcttctgataggtatgcatgccagtccaatcgaggtaaaaagcatgtgaagtgtcacgatcgtcatccatttgactttcatattgacaccggagaattagatgctaatacaaacgtaggtattgatgtcttatttaaaatttctaatccagatggatacgctacattagggaatctagaagtcattgaagaaggaccactaacaggtgaggcattggcacttgtgaaacaaaaggaaaagaaatggcatcaacacatggagaaaaaacgattggaaacacaacaagcctatgatccagcaaaactggcagtagatgcattattcacaaatgcacaaggagaagcattacactatcatactactttagatcatatcaaaaacgccaatcagttggtacagttgattccgtatgtacaccatgtttggttaccgaatgctccaggtatgaactatgatgtatatcaagggttaaacgcacgtatcatgcaggcgtacaatgtatatgatgcacgaaatgtcataacaaatggtgactttacacaaggactaacgggatggcatgcaacaggaaaggcagcggtacaacaaatggatggagcttctgtattagttctatcaaactggagtgccggggtatctcaaaatctgcatgcccaagatcatcatggttatgtgttacgtgtgattgccaaaaaagaaggtcttggaaaagggtatgtaacgatgatggattgtaatggaacacaggaaacactgaagttcacttcttgtgaagaaggatatatgacgaaaacagtagaagtattcccggaaagtaatcatgtgcgaattgaaattggagaaaccgagggtacattttatatacaaagcatcgagttgctttgtatgaaaggatatactagcaatcacaaccaaaatacaggtactatgtatgagaaaggttataatggaaattatcctcagaatactagcagtatgtataatcaaaattataccaacaattatgaacagcattccggttgcacgtgtaatcaagataaaacgaaatacctttaa

SEQ ID NO: 213 - DNA, 2004 bp, Artificial sequence
  Synthetic polynucleotide or polypeptide
atgaaaaatatgaattcatatcaaaataaaaataaatatgaaatattggatgcttcaccaaataatacaaataagccaaacagatatcctttggcgaacgatccagatgttatgaaaaatacaaattataaagattggctaaatgaatgtgaagggattactccttcgggtgtaagagggggatttacaagtataatatctcttataataaaaggtcttgcttttcttcaagcgccttctttggcaggggcattcggaatagggacagatattgctaatttattgacaaatggtaatgtatctcaactgacagcgacggagataagagaccttattcagagtgggctaacagacttagctataagtatagcaagtgggaattttaacgacatagtagcgaagtatagagactatcttacggcgtttaaagagtgggaagacggtggaagaacaaatgactatgccagaaaaaatgctgcaagactgattcaggaggctgaaagcgcagcagcagagctgggaccattttcccatggtgactataaggtaccgttattgcctacctatgcacaaactgcaaatcttcatttgaaaatattaagagatattttgagacatggagcagatttaaaaataatagaacccgctactcgtacttactataggacgcgactatttaatggtttacgagattatactaattattgtgtagagcagtataatgcaggtttaaaccagataaaacaggctggtacaagtgctgcaaattggctgagatttcacaagtttcgtagagaaatgacattgtcgatattagatttagttgcattatttccaatttatgatgttgatagatatgatttaccagtaaacgcggaattatctagaataatttatacagatccagtaggttatactgggtccggtggtatatcttggtatgcacctcaccaaggtgctaattttaatgatttagaaagagagacaatacgtcctccatttttcaacaattggttgaagccttctttatatatatatacaatacggttcggaagctttgtaggagaagtgtgggctggtaatctcaatagactaaatacccatgcagggtatggtttagggaccagaatagacgggcatacatcggatccttctcctagtattgatacgaatattgatatttttaaagtaaatatgactgctgccacagatttgtttttggatgttggttatattccgcgtcgtgtatatggaattagtagatctgaattttttaatagacaccgatctcaaacatatgcgaggaattccggttcaatggggactcaaaatgtaactgtaactcttccaggagaaacatcagaagtaccaactgcagataattatagtcataggttatctaatgtaagaaatttaacaggaggaattcatcaacacaacctccctagtcgctcctccgtagtagcacatggatggacacataaaagtttaaagactgtaaataattatacagccaataaaattaaccaaatacccgctgtgaaagtaagagattttcaggattgggcttatgtaattttaggacctggatctactgggggagattcagtcagattaataagtggcgggcaattgaattacatcttttcggctaacgatgtagcagcagatagagtgaattatatagtgcgttttcgttatgcttttgtggggcaatctgaactaaatgtaaggttcggtaatcagaactttccatatcgagttacacttgcttctacaactacatcattaacaaatcttcaatatcagcattttggttatgcatctgttccatatgccattagtttgtatgaattcggtggtcaaatgactatatataatttcagtcaaaataacaacgtagtgctagatgaaattgaactagtcccaaatatatcaacatcagcattttcgtcatcagaaaatgcaaaagagtctgttgataatttgtttattaataaataa

SEQ ID NO: 214 - DNA, 858 bp, Artificial sequence
  Synthetic polynucleotide or polypeptide
atggctattattaatttaaatgatatcgtatcgaattatcgaccaccatacaatgcatttacacctacaggaccactctcagaagatgctggtcctctaggtttaggaaccttaagtaatagtttatcgataacaggaacatctaccaatacagctgatatccctatcattggactcgggcgtaacatcgtactacaacaaactgtcgacaatttacaaggtaacattgatatcacaaaagaatttacttttacagagacgacagaagatgaatcctctactaccgttacatcgggggttacaactgacattaaagctgatgtatcgctctcaggagtgctcgattttattacattaggtctcacgtctgctttctctagaagtacaacgcttaccaatcagactacggatagaatagcaaaaacacatgtttggggagacaaatataccatcactgttcctaaaggaacaaaatctactgttttcttcacaatcacagtgggcccttttaatacaactattgatgtagatattaaactgagtggtaccgtacgttatttttataatcaaggatttctagttctcggacccaacatctatgacacaactggtccccgtatacatccttatctgcgatatgaaagttcaccgattgatatcaaaaccattttccaaagtcaaaatgtaccaggtgttacgtatcctagcgatggtagcgttcatatcaaagggcaactccaactaactggagaagtgggattaattagtaaattaacacaaaaaacagaaacattaacaggacctcctgtcataacaaacctttcctctacagacgcccccaaaacaattatattttaa

SEQ ID NO: 215 - DNA, 1497 bp, Artificial sequence
  Synthetic polynucleotide or polypeptide
atgaattcagaacaacgtaaacaggggcaaaataatgaatataagcatcaaaatcatggtgtatcttgtaattgtggttgtcagcaaggtaaatatgaatacgagcaaaaactaagtagggaagaatataacaatcaatatatgtcaaatgaacagatacaaaactatgaaggaatgggatattctgtagcaaatgagggaacgcgaaatgatatgtatcatgaaaataaaaattattacagctgtagtccaacacagtttaatacacctaatttacctgatgaaagcaaaagatttcaaacgattacaaatattaatacgagcgctaacggccatcgtgttttagatgcaatggataccactgttgggcaacagcttcagagcggctttgggaattgttcgatggtaagagttgcaaatacagtagttaatgaacaggttcgatttttgaatgaatctcaactttttgttttttatcaagcagatgatgggaatttttttattgctaataaagggaatgggcgagttttagaagttatacctaatagtatacatggatatttagtaatttctaatttgtataatgctgctaataataaccaaagaattagcaaagaaaatgtaactactactaattttagattaagatctcaaaatacagcaataaatatatgtggtcataatatcgatcggtttgtaccaattactgctgaatcaacactcaacaataaccaattcttccgattcagacctgaaaacatggagaatatcttgcttccagcactacgatctggagaaacgttgagaccattaccagaattaacagggttgaatgatgcaggtccacttccaagcgaagcaccaagagccgttataggaagtgcattaataccatgtatatttataaacgatgtgattccattagatcgaagaataaaagaaagcccatattacttattgcagtatagacaatattggcatagattatggtcagatagttttgttgttggaggtagtagacaagttacagaagaaacgggaatatctgatggagcacaagaaaacatgaaaaatacgatagatatgtcaataggcgcagattggggtttacaattttttcaacaatcaaatccttttagtcaacaaattagttcaggattaaatatatcaagatcttttactagtgtgccattagggcctaacagagcacaatctattttccgaaatccaaaccccttcatgacaagattttccaggtttgcaagagcgtttgaatatgtattaacacgtactgatggaacaatagtaggaacatgggtagccgtagataatagaagtatgtattttaaaacatttccccataatgcaacggtaatgctggaaaatcaaaaaatagtaaggtctaataacagttatgatttatccgtatggaaaacaccaatgataataaaagatggtgaaatcggttctgttgcaaagttttctaagcggatataa

SEQ ID NO: 216 - DNA, 1173 bp, Artificial sequence
  Synthetic polynucleotide or polypeptide
atgaaaaaacagaaaattaagaaatttccattctcaaaaaaagtcatgacagggttacttgtaggtgcaacaagtctatctatctgggctccttcaagtctagcagctccagtggataaccaatattattctattaatttgaaagctaaccacaacatcgtttgggatgtattgggtggatataccggaaatgcacagattcttttatataatggaagccgtggtgacaatgaacaatttatattttttccacttgatggaggattatattcaattgtaaataaaaatagtggaaaacctgtagtagctggtacttatggtccttcgaatcttttggaacaaaatgaccaaggttggactggtggatctggtcaaaaatggaatttacgagaccagggaagtaataattatgaaattgtgaaccaaggaaatgggaaagtcgcatcatggggatggaatggtatagtaggtccagcttcatatgagtatttagattttgatgatccaaacccttctgattccaatagggtattttacattggtaatactcacggtactattccaaaaccaactataccaacagaattccctgcacgaccagctgctccagattatataaaaaatgctggtgttgatcaacaattacctcaaacttcaaattctgttgttagggggaaagctgcagtaccttgtattatggtaaatgataatcaatggagtgattatacaaaaatacacaattcaccatattatactttagaaaaagaagaatattgggagaaaacacattcggcggttgttgtacctggtgcgcctcaaacttatcaatttaaaacaggtatgagttctgtaaatcaacaaagcatgactgatacgctttctataaacattggagcagatttaggattgaaatttggagataaatcagcatcacttaaaggaagtattacatatacaacacaaacaacaattagcaaaactgatacggcaataaatgaagtgatgcgtacaaaatcttttacaagtgatcctggtgaaaaagcagcatttacagaatatcaacttgtaacaaaatatacgttaaaaagacaagatggttcaattgtttcagacccttggattgtaagagacgaaaataatgtagtaacaagaaagatatcagcaccactataa

SEQ ID NO: 217 - DNA, 1446 bp, Artificial sequence
  Synthetic polynucleotide or polypeptide
atgaattcagatcaacaaatatatgaacagaacaataaatttagacatcaaaatcataatgtatcttgtaattgtggttgtcaacaaggtaaatatgaatacgagcaaatacaaagtaaggaaaaatataataatcaatatatgttaaatgaacaaacgcgaaatgataagtatcatgaaaatcaaaattatgatagctgtagtccaacacagtttaatacaattaatttacctgatgaaagtaaaaggtttcaaacaattacaaatgtgcagaatcctaataatagtaatccaagtcttaatgcaattgctacaactagaaaacaatcaattgatggttttaatgacttttgtcgttctattagtctagattatcaattgataaatcaggatttagaccaaacaaaggatacattttattatatcttttatttggcagatagcggaaattttgtcattgctaattatgggactggacgtgttttagaaaatagaacaattgaatctgacgaaagagcaattatatcggacttttatacaggttctgagagtcaatttttcagaaaaacctcaagggtagttaatcagttcagtttatccccacaactagaattgaatagagcagtaaatgtatgtcataatactgttcatcttcggacaaaaattacatgtggacttaataatgcggataatacgtctagtgtatttagatatatagaggatttgaataagcctataactataccttctttttcaaatgaatcaagattaggaccaccacctgtattaactagtttggatgatccaggtccaaatccaaatcgaaatgcaccaaatgcagcaataagagcaaatataggaagtgcattgataccctgtatatttgtaaatgatcaacttcaaatagatagaagaattcaactaagtccttattatgtattagaatatacacagtattggcatagagtatggtcagatgtgcttagtcctggagctagtgggatattcccggaattaacagggatgcctaaagaagcacaaacaagcatgagaaatactatagatatgacaataggtgcagattttggtataagatttggaaataaatcgactccttttaagaggggaattctaagtgatttaaatgctcttgaaagctattctagtcaggagttaggacctagagatgggagttatggatttacaaattacaatttagtttcagttagatattcaagatttgtaaaagcgcatgagtatacattaaaggatattaatggaaaagaagttgtgacaccttgggtagcattagactatagaactcaatatttgtctagatttcctgtagacgcgacagcatcattacaagattataaaataaaaagtagttataataattatgatttgccagtattagaatataccgataaaaataaaaaatggtaa

SEQ ID NO: 218 - DNA, 1212 bp, Artificial sequence
  Synthetic polynucleotide or polypeptide
atgaaatcaatatcaaaaaaagtcatggcaggattacttgtaggagcaacaagtttagctatttgggctcctgcaagtgaagcagcagctctagagaagaatcaatattattctattcatttgaaagataatatagaaaaagtttgggatgtatctagtgcatctaatgatagtgatagagcgattcttttatataacggaaaccgtggtgacaatgaacaatttgtattctttcaacttgatggaggagcgtatgcaattgtaaataaaaatagtggaaaacctgtcacagttggttctcgtgcttggtttggtaatgctactgctaatagagttatgtctggggagagtttactacaacggagttggactggtggttctgctgaaaaatggtatttacgaaatcagagaagtaatatttatgaaattgtgaaccaaggaaatgggaaagttgcatcttatagatgggagggatcactagttgataatgtagagtatgcagagttggctgaatcaaatccttctgatccaaaaaaggtatttcacatttctaagaatgcatttggtttcgagggttttacaattccaggtgttaatattgattatggtactttttcattaccacagttaccagttgtaggaaatagaccagatgctccaaattatactggaggtattgatcaacaattacctcaaagttcaaattctgttgttgttggagcatctttagtaccttgtattatggtaaatgataatcaagcgagtgattatacaaaaatacacaactcaccatattatactttggtaaaagaagaatattgggataaaacattttcagcggttattccagctggttatactaaaaattattcatttaaaacaggtatgacttctacagatcaacaaaagatgactgatacgctttctatgaagattggagcagatttaggattaaaatttggacaacaatctgcatcacttaaagcagaaatttcaagaacattacaaacagaaattagtacaactaatacggaagcaacggaagaaacagttacaagtactgttacaagtgaacctggtaaaacaacaggatttacagaatatcaattggcaacaaaatatacgttaaagagagctgatggttctcttgtttcagatccttgggttgtaaaaaataataagatcacagtagcaagaaaaaatgcacaataa

SEQ ID NO: 219 - DNA, 1182 bp, Artificial sequence
  Synthetic polynucleotide or polypeptide
atgaaatcaatatcaaaaaaagtcatgacagggttacttgtaggagcaacgagtctatctatctgggctccttcaagtgaagcagctccagcgaataatgcatatcatactattaatttggcagctaatgcatacataaaatggaatgtatatggaggttggggatctgatgatgcagggattattctacaagatggaggccttgatgacaaagaacaatttgtattttttccacttgatggaggaacgtatgcaattgtaaacaaaaatagtggaaaacctgtaggacttggtaatggtgtgcattatactgacggtgttcgtcatatgactactgcgttgaatgatgaagctttgggacaaaataattggactggtgccgctactgatcaatggtatttacgagacaagggaaataataattatgaaattgtgaaccaaggaaaaggcagagttgcatctgagacgtggaatgggataagaggtccattttcggtgcagtatgtagatttggatgactcaaatccttctgatcctcacaggttatttcatattccatctgctcctcagagcactttttcattaccaaccctaccagctataggaactagaccaaatgctccagattataatccaactggaagtattgatcaacaattacctcaagcttcagggtctgttgtagttggtgcatctttaataccatgtattatggtaaaggataatggtgcgagtgattatacaaaaatacacaattcaccatattatgttttggaaaaagaagaatattgggagaaagtacgttcagaaattgttcctgctggttccactagtaaatatacagttaaaacaggtgtaagtactgtagatcaacaaaagatgactgatacgctttctatgaactttggagcagacttaggatttaaatttggagatacaactgcatcacttaaatatggtatttcaaaaacattacaaacagaagttagtaaaacttctacggattcaaaggaagaaacagaggaaaagactattacaagtatatctggtaaaaacacaggatttacagtatatcaattggtaacaaaatatacgttaaagagaacagacggttcagctgtttcagattcttggactgtaagagacaagaatcaaacactagtaagaacaataactaattag

SEQ ID NO: 220 - DNA, 804 bp, Artificial sequence
  Synthetic polynucleotide or polypeptide
atgatacctgtaattggtgaatatttggttatggatcgctttgttgctgcctgcttaggttttattttgaactatgctgcccattttgcggaaattttccgtggtggtcttcttgctattgataaaggccaatatgaggcatctcaagttctcggtctaaataaatggcagacactaacgcggattatacttccccaaatgttccgtatagcacttccagctgtaggaactagaccaaatgctccaaagtatactgagggtggatcaattgatcaacaattacctcaaacttcagagtctgttgttgttgggacatctttaataccatgtattatggtaaaggataatggtataagtgattatacaaaaatacacaattcaccatattatactttagtaaaagaagaatattgggataaagtatattcagacattattcctgctggtggcagtcgtaagtatacacttaaaacaggtgtaagtactgtagatcaacaaaagatgactgacacgcttgctatgagctttggagcagacttaggattaaaatttggagactcatctctatcacttaaatcaagtatttcaaaaacattacaaacagaagttagtacaactaatacggaatcaaaggaagaaataattgaaaagattgctccaagtaaagatggtaaagagacaggatatacagaatatcaactgaaaacaaaatatacgttgaagagaacagacggttcagctgcttcagctccttggattgtaaaagaccctacgcaaacactatcaagaacactaactaaatag

SEQ ID NO: 221 - DNA, 2109 bp, Artificial sequence
  Synthetic polynucleotide or polypeptide
atgaatcataataacgaatatgaaattattgattcgcataccttaccttattcttcaaacaaaaacagtaatgattctagatacccttacacaaatgatccaaatcaaccattacaaaacacgaattacaaagattggctcaatatgtgtcaagggaatacacaatatggtgataatttcgaaacgtttgctagtgctggtacaattgctgcaattagtgcaagtactattgtaatcggtactttgataggtagtatgggtgcgctcactgctctatccggacctataggaatattcggtgctatgttaatatcttttggtaccctactccctatcttttggccggggggagaacaagacaaaacagtatggacacaatttattaaaatcggagaaaaatttgctagccaggagttaacagaaaatgaatttgatagtgcaatgcatagaataaatggaagcaaagaagtattaaatctctacgaggatgggttaaacagttggataagattaaaaaaactacaagctcctggatcaccaccatcatcagcattacaacatgctgcctcccatgttaaatcactatttaacattgctcatgccaatttgctaactaacctaggtgaactcgaaggtggaaatcttgcagtactattcctacctgtttttgcgcaaactgctaattattatttaaatttattacaacaaggtattgaatttgctgataaatggattcaagatgcatttccttcactaatggaacctgattctggaacatcagattactattataaattattaaaagaaagtatacctaaatatagtaactattgtgcaaatacctacagaaaaggactaaatgaacttaaaaaccaacctaatatgacatggggtatatttaatgattatcgaagatatatgactatttctgtattagatatcatcgctctattttctttctatgatataaaaagatatagagatgaactaaaactagaaagaatagaaggctttagatatgaattcacaagagaaatttatacaactgaaataaattttgaccgtcttacttccactgcccttcaaaaacaacccagtctcactacaatggaatataatttaacacgttcaaatcttagtttattttcatttttagatcaacttgaattttatacagaagaaacaaatccggggaagcgtttaattggtattataaatcgtagtaaacctacttatggtcaaggaaaagaatatttatatggacaaagaacaggttcacctgacacaaaaattttaataccatttgaatcctataaagtttcaattataactgataaacaattttatcctaatacatactatacaattaatcaaattgaaatttatttaaatggctcatctgacaatataaaaagatattcagcaggagggtctttatctgatgataaaaaaacaaatgattatcaacttcctttaaaaagcgactgtaaccaaattactaatccaaattgtttaccaaactataatagttatagtcatattttatcccatttttctttatatgcttattcctatctgcttggattaggaatgcatatattatatacaggtgcattaggatggacacacagtagtgttagtagaaataatccaatatcagataaaataattacacaaataccagctgtaaaaggtagctatcttgatgcagagtctaaggtaattgaaggacctggtcatacaggaggaaacttagtttatttacgatttctaaaccgtttagaaattatatgtagaactcctaattctacacaatcttattacattagacttcgatatgctacaaatggtactggaaatattactaatcttcctaatatagctcttacaataccaggagtaatagcaataccacctcaacgactcaacaacactttttctggtacaaattataatgatttacaattcgaaaattttgcttatttccaatttctagatacagtaacattacctttaaatcaaaacatagcatgtatatttaatcgtgcagatatagcagatgcaatgttaattattgatagaattgaatttataccaataaaaaaatga

SEQ ID NO: 222 - DNA, 2076 bp, Artificial sequence
  Synthetic polynucleotide or polypeptide
atgaattcatatcaaaataaaaatgaatatgaaatactaaatgcttcaccaaaatattctaatagatcaaatagctatccaaggtatccactggcaaacaatccacaaggttcaatgaaacatacgaattataaagattggttagctatgtgtgaaaacaaccaacagtatgatgttaatccagctgaaattaattcctcttcagttagtaccgcattaaaaatacttggaaccctcgttaagtttatagagaaaattgaagggatagggcctgtctttacagcacttagtgcgatacttcctgttctttggccacccaatactccaacgcctgaaagagtttggaatgattttatgaccaatacaggaagccttattgatctaacagtaacagatcttgtacgaagagatgcaaatgcaaaaatggcggttgtaaaagataatctaaatcaatatacaattgcatttaacaattggaacggaaaccgtaatgacccactctatagaacagctgtaagagatcgatttaactcaactaatggggtacttcgagataccgcagtctattttagcaacctacaaggttatgaattattgttattaccaatatacacacaagtagcaaattttcatttacttttattaagagatggtctcataaatgcacaagactggtctttagcacgtgatgctggcgaccaactttatcaagatttggttaaatacaccaaccaatatattacacattgcattacatggtatactactggtttaaatacacttaaaaatagaaatgtacaatggggtacatttaatgaatatagaagagagatgactatccaagtattagatataatttctcttttttccagttacgatccgcgtaaatatcctgcggatataaaagatactacgaaactaccaaaaacagaacttacaagagagatttattcagcactattagattctcctcctaataaaccaatagcagcattggaggaatcacttacaagagatgttcatttattcacttggccaaagagagtagatttctggacctttaattataatatgtacccagatgtaagattcttatctgctaatagaattggtttttcatatacaaattcttctgtaatacaagacagtacaatttatggaagtactacttttggtacagtacttactcgtcaaattccgcttaattctaatgtttatagaacttctatcacaaatactacagcagtccctgatcaagttacaaaaatggatctctacttaactaatggcacttctgaatcttataattcaaatataacgccagttcctaatgatttaagaaccacactttttggattctcatcaaatgagagcagacctaatcaaccaactgtagaagattatacgcataatttaagttatataaaaactgatattataggaggtcacagaagcagggtttcatttgcttggacacatagaactgttgaccctaataaccaaatactcacagataatatcacacaagttccagctgtaaaatctattttgttaaatgcacaagctaaagtaattaaaggccctggtcatacaggaggagatttagttgctattacaagcaacggtactcaatccggtagaatggaaatcctatgtagagcaagtaactttagtgactctgaaagaaggtatcgtttacgcatacgttttgctacaaatagtaatctttatgtatatgtaacatatacatcgaacggtatccctagacaaacaccatttactactgatcttattcctaataataatgagcgctttttcctaggtaatacaataccaacagatttaagatatgattatttttattacagagagtcttttaatacaattttacccatgcgtgtaactccaggtgaactaataactattgctattcaaccgtcaaatatgcttgcaaatcaaatattaattattgatagaattgaatttattccgataactcaatctgtattagattatacagaggaacaaaatttagaaacagcacaggaagcggtgagtaatctatttataaattag

SEQ ID NO: 223 - DNA, 702 bp, Artificial sequence
  Synthetic polynucleotide or polypeptide
atgtcttatgtacttttaaataataattgtattcaaaattctcttatcccatctcatcagagaattactttaacaatcccatctagcaacagagagagtctaaagaatatttttcaattagaaccacaatatataagccaagctctggcagcaagtaatgcctttcaaggagcgatagattcaaatttgaattttaattatgagagagcttatcagataggtgttaatatgcctggaagagactatgatccatctatgtgggggataaatcaatcggttatacaagaaactttacaagtatcatctatgataaatcaattaaaaagctctttgaataaatttctttattttgttgatatttcgaatgaagcgttctggaatgaagtagaaacagctattataaatacttttaccaatctacatacccaacagaattcagcatggatcttctatcatagttcaacatctacttcaacaagttactattataacattatgttcgcgttgcaagatcctaattatagaacgatgattgttatacctatagcatttgatattactgtaagactagaaaaagaaaaggtactatttattacacttaaagaccgtgcagagtatagagttacactcaaatctatttgggtacggttaattttacaaaaaaatcatgataaagaaattgttaatatctttaacccttaa

SEQ ID NO: 224 - DNA, 1548 bp, Artificial sequence
  Synthetic polynucleotide or polypeptide
atgaaattaatatcaaaaatagtaatgaccgcgttaatagtattgagtacatttgcattcaacttaggtggacaacttgataagagttttctttctacctcaaaagcatatgcggatgtaatcaaggcacttccacaaaatgcgtcaaagatagagttagattatgctcctgtgtatgactacgacacagacgggtgttatgcgactgcagcaatttctccagatggcacgactaaccctggcctaggtatgagcggttccccggaaagtgtctgtagagatattaaccgactggaaaattcaaacacttattctcgggccaaatcaaataatggttggactgcaattatgtatgcgagttactttgagaaagatcaagaattttcgggccctggttcggctggacatcgacatgactgggaacacacaatagtttgggttaaagatggtcaggttcaatatgtaacttattcagcacatggtaattggtacactaaacctcgctcagatgttagattcagtggaaaccacccgaaaattgtataccataaggacggcggcctgacacatgcttttcgcctggctaatagcaatgacgagccaccagaaaaccattatcatcagtggctccaactaccaatggttggttggaatggctatccaagtcaagctattcgagaaaaactaatgactacgaactttggatctgcaacacttgaaatcaaagatggaaattttgaaagatcccttgctagtgcaaagccacccattaactttgacccttacgcaccggaactggaagatggtggtacttatcaaatagtttctactttaaataatagtagtgtcgttgacttaaatcaagcagatggaaatgttcatttgtggcaaaatggcaacgctaataatcaaaaatggaagctagtatatgatttaagtaaatcagcataccaacttaaaaatatagcaaatcaaaatttagtattagcttggaatgatcttaatggttccaataatgtagttgctacatctaatcaaaataaggaagagcaatattggataccaacagaagcaggaaatggatattattatgtaaagaataagaaggattcaaacaaagtgttagatgtaagtggtaatggtactacaaatggaacaaatgttacagtatataatttccatggtggtaataatcagatattcaaattgtctaatgtaacagggaatttaacaagagaagtggagtcactctataaggcacagcctggtcaaagcagtagatcaagtaataatttttcacttgaacaacttgcggcaggtaccaaagtacgagttgttttagaaggagcaggtgctacctctttgtcatttaaaatttcaagagataaatcaggtacagaccctataatttggtcaaatgttagagatggttctattctaacgatcccttcaggagatgatagaaagaatttgtatatctcaggtcctcctagcggatatacttctaacggtacatttaaagtgaaattctacgctcttccaaactaa

SEQ ID NO: 225 - DNA, 1548 bp, Artificial sequence
  Synthetic polynucleotide or polypeptide
atgaaattaatatcaaaaatagtaatgaccgcgttaatagtattgagtacattttcattcaacttaggtggacaatttgataaaagttttctttctacctcaaaagcatatgcagatgtaatcaaggcacttccacaaaatgcttcaaagatagagttagattatgctcctgtgtatgactacgacacagatgggtgttatgcgactgctgcaatttctccagatggcacgactaaccctggcctacctaagagcggttccccggaaagtgtctgtagagatgttaaccgactggaaaattcaaacacttattctcgggccaaatcaaataatggttggactgcaattatgtatgcgagttactttgaaaaagatcaagtatcttcgggctctggttcggctggacatacacatgactgggaacacacaatagtttgggttaaagatagtcaggttcaatatgtaacttattcagcacatggtaattggtacactaaacctcgctcagatgttaaattcagtggaaaccacccgaaaattgtataccataaggacggcggttcgacacatgcttttcgcctggctaatagcaatgacgagccgccagaaaactattatcaccagtggctccaactaccaatggttggttggaatggctatccaagcctagctattcgagaaaagctaatgactacggactttgtaaaggcaacacttgagatcaaagatggaagatttgaaaacgcccttaatagcgcaaaaccacccattaactttgacccttatgcaccggaactggaagatggtggtacgtatcaaatagtttctactttaaataatagtagtgtcgttgacttaaatcaagcagatggaaatgttctgttgtggcaaaatggcaacgctaataatcaaaaatggaagctagtatatgattcaagtaaatcagcataccaacttaaaaatatagcaaatcaaaatttagtattaacttggaataatcttaatggttccaataatgtagttgctacaactaatcaaaataaggaagagcaatattggataccaacagaagcaggaaatggatattattatgtaaggaataagaaggatcaaaacaaagtgttagatgtaagtggttatggtactgcaaatggaacaaatgttacagtatataatttccatggtggtaataatcaaacattccaattgtctaatgtaacagggactttaacaagagaagtggagtcactctataaggcacagcctggtcaaaccagtagatcaagtaataatttttcacttgaacatctcgcggcaggtaccaaagtacgagttgttttagaaggagcaggtgctacctctttgtcatttaaaatcgcaagagataaatcaggtacagaccctgtaatttggtcaaatgttagagatggttctattctaacgatcccttcaggagatgatagaaagaatttgtatatcgcaggtcctcctagcggatatacttctaacggtacatttaaagtgaaattctacgctcttccaaattaa

SEQ ID NO: 226 - DNA, 1044 bp, Artificial sequence
  Synthetic polynucleotide or polypeptide
atgactataataaatttagaggatttaattagatacaaagtagggtttctcccatttgctgctcttaactggtgtgatcgtgatttatatcgatattatagagataatatatggaacccaagcgaaatgcatttttatcctttcccaatttcaaataaaataaaaccagattgttcgaacgagacagggggggcagagttaacgtgtaacgaaccacctggaacagacaaattagtcgatacatccggattagaaatacgcaattatcaattaaatgttccacctactgctatattagaaaatttgtcaccatttttttttcaaatagataattttaaaaataacacttcttctacacaaacatatactacgctagaatattcagaaaaactaattgaaacgacaacaacaaaaactacacacggctgtaaaacgggaacaaaaataactgccaaacaaagctttaaagttccttatataggaacaacagagtttgctgcagaaatttttgcagaatacaactttagtagtgaagtcacagaaacaactacttccgaaaaacacttacgagttccgccactaaatgtcatagttaaaccgggaacaggtgtacgtgtaaccgcgtctgtatcaagaggatttttacaagcaaaggacgcaaggttatctatggagttagcagggcgttttgcttttagatatggtggaaatctccatagctatggagatttatatccttggttatttacatataatcaagtttgcccaacacaatttgatttcaatttttatcaaaatggttttagctttattcctgcacgttcaactataatttttaatggaaaaactaatatagaatctacttttatggcagctttgtttgaggtaacgatggaagaatatgacttaataagaaatgctgttataaaaacaattgttaaaacctatgatttagcaacgagtactcttatattagaaagagtacaaaattcccccctgattcattatggtttacaacctaaaaaaattttttttgaaaattga

SEQ ID NO: 227 - DNA, 1101 bp, Artificial sequence
  Synthetic polynucleotide or polypeptide
atgaaagtcaaatcagctaagttaacactttgtgctttgtcagtagcgatgatttctacggcaataattcctagtacgtcagtttttgcagcagaaacacagttaaaagtaggacaacaagaggtaataccagatgctatatcttatattgatactgtacagggtcgaatgaagcaacgagacgaagaatcaaaactaaatggtaagccaattaatatgcaagaacaaattatagacggatggtttttatctagattttggatatttaaagatcaaggcaataaccatcaaacgaatagatttatatcatggtttaaaaataatcttgctagctcaaaaggctatgaagagattgcggaacaaatgggtttaaacattgaagtgttaaatgatatggatacatccaatgtaatctacacttctaaaacaggagatactatatataatggtatgtctgaactaactaataataccggaacaattcaaaaaatgaaaacagatagctttcaaagagattatacaaagtctcaaacgacttcggtaacaaatgggttacaagtaggatttaaagttgttgcaaaaggggttgtctttttagcaggagcagattttgaaacaagtgttaactataatttatcaacaaccgtatccctaacaaatacagtttcagataaatttactgttccatctcaggaagtaacgctaccaccaggacataaagcagtaataaaacatgatttgaagaaaatggtttattctggaacacatgatttaaaaggtgatttaaaagtatcatttaatgataaagaacttgtacaaaaatttatttatcccaattatagagaaataaatttatcagatattcgtaaaacgatgattgaaattgatcaatggaatcatgtagatccggttgatttttatcagttagttggtgtcaaaaatcatgtggaaaacggagatactatatatataaatacccctgcagaattcacatttaatggagctaatccgtattatagagcgacatttacggaatatgatgagaatggaaatgctattcaaatacaatcattagatgaaaatataaagttgaaaaattaa

SEQ ID NO: 228 - DNA, 1248 bp, Artificial sequence
  Synthetic polynucleotide or polypeptide
atgactcaaaataaaatcacaagtcaaaaaaagtcatttaaaaaacgtaaaatctttaaatataaatataacgtatatatgctatattctaattgtaacctgatacatacacaaaacataactctgtatatgtatcaaatcaaaaaagacaaaggagaattaattatgaaaattaaaaaggttgtcccatcaatcattgcattttctactttattaaccgttgcaccagtttcatcttttgcagcagagcatgacgctttaaaaaattccaagctttcaacatcagataggtcatcctatattgatgctgtacaagatcgaataaaaactagagatttagaatctagattttttaataaacctgtaaatatacaagaacaaataatagatggctggtttttagctagattttggatattcaaagatcaaaacaataatcatcaaacaaatagatttatctcatggttccaaaataatcttgctagtgctaaaggatatgatagtattgcagaacaaatcggattaaaaattcaagctagggaagatatggatatttcaaatgtacaatatacttctaaaattggtgaaactatatatcaaggtatctcagaattaactaacacttttaatattacacaaaaaatgaaatctgatagttttcaaagagattacactaagtctcaaactacctcaataacaaatggaatacaattaggttataaagttgctgctaaagggattgttcccttagcaggtgcagatttcgaagcaagtgttacattcaatttatccggcacttcttcagagacaagtacaatatctgataaattttctgttccatctcaagaagttacattaccacctgggcatacagctaaaataaagcatgatttaagaaaaatgatttactctggaactaacgatgtaaagggagatttaaatgtaacttttgatgataaagaaatcatacaaaaattcatccatacaaattataaatcaattaatttatctgatattcgtgctactatgactgcaatagatgaatggaatcaagtaacacctaccgatttttataatttacttggtaagaaaaattatataaaagataatgagactctatatattgatactccagctaaatttaatttcaatggtgctactccttattacagagcaacatttatacagtatgatgaaaatggaaagcttgttaaaacacaaaaaataactgaagatattacagattaa

SEQ ID NO: 229 - DNA, 1047 bp, Artificial sequence
  Synthetic polynucleotide or polypeptide
atgaaacttattctattttttggcatggcagaaaactcaagaacttgcatattaaaaacagaaaattacaactataataaaggtggtaaaaacatgaaaaaacctagcaaaaagacaaagcaaattctatctttagcgatgataggtgctattggtacatcggttgcatttgcatcaccagattcagtaagtgctgctcaaattaatcctactcaagttaatgcacaaaaaccaggaagcgtatctatttcagactggaaggtacctatccaacagacataccaaatgtataaaaaacgtcaacctaagctttttttatccaaggaagtaataattaaaaacccgaagatttataattcctatgtagaagcagatggttcgcctactattacggattcaaagagtttatttgtaggaaagtccatattaaccaacaattcaaataaagagcagacccttactacaaatcaattctcgaaaactttcgaaagttctgttactaattctactacacatggatttaacttgggagtaagtacttctgcatcctttggtatcccgcttattggagaaactaatgtccaaatttctactgaatataacttttcaaatacagtagaaaaaagaaaggctgaaagttacacatatactgctagtccacaaaatatcgttgttcctgcaaattcatctgtagaagttcttgtaagcttaaatactagtaagataagtggaaatgtaaaccttcttactcacgtagacggtactctttattttaacactaaccctaataacccaggatctatgagagttatgggacttaaaccatttttaagtagttttggtagtattgataaaaatataaaacctcatccacagaacggtgcatatgtaataggaaagggtaaatactcagctgaatatggatcagacttctccgtaacagtaagtcctattaataaaccaaacgtagcttctaccaaacttagtgaatcagctaatgaaggctacacatatacagtaaaaccagaagtaaaaaaagaacaataa

SEQ ID NO: 230 - DNA, 2859 bp, Artificial sequence
  Synthetic polynucleotide or polypeptide
atgaatcgaaaaacattaaagaagacatatgcatgtctagctactgctgtattactaggacaatttgcgggaaaatcgtctatctcatatgcagaggaaaaacaaacaaaacataccgaacaacaatcacaagagagttctaaccaagaattcacgggatttatggggtattactttaaagataaaaatttccataaacctattgtagtgaatccaagtaaagatggaaatttatcactggaaaaagaggaaatcagtgaccttttaacagtggagaatcaaaatatccaggcagcgagatggataggaagaattcaaccatccgaggatggagaatacaccttttccacatcttcagatcagcaagttatcctgcaaattgatgggaaaacagtgatccaacaggcgccgatgaaagaaaagatgaaattagaaaaaggaaaatcttatgaagtttgcatagaatatgtgcgagaagagaatgcgaatcaagatattcagctgcaatttttttgggaaactgctgatctaaaaaaagaagacatttcggggaagaatattttatcaccagatttttctaaaaaagaacggaaaagtaactttgtaacagatggaaatttatttgggagtaagtatgatgatgatgacgaagaaattccaatagatacagatgatgatgccatttatgatgattgggaagaaaatgggtatacgattcaaaatatgatggctgtcaaatgggatgattccctcgctgaaaagggatataagaaatatgtatctaatccatatagaagtaatacagtgggagatccttataccgattatgaaaaatcagcgaatgtcatggatccagcaacaaacaaagtagcaagaaatccattagtcgcatcctacccaactatcggggtttctttggataacttcacaatttcgaaaaacaatgacattactacatcaacgggggaggatacaagtacatcttttacgaaaggtacatctaatagtaagacaaatgaaacctctcaggggattgatgtgactgccagtgcagaaataactgtatcgattactccttcagcaacagctagtttaagtgtatcaaattcatttaatgaaagtaatagtacaaccgccacagtagatgagtcggagacaggttcatcagggcaaagttggtcagaatctataggaatcaatacagcggagtctgctttcttgggagccagggtacgttatgtgaatacgggaacagcaccagcatatcagttgaaaccagatgtatccttaggtatgggtgagaatcatacactttcctctggtattgtagacgagaaatataaagcgaatgtattaaacccggatgcaactttcccgaaaaaaggtagtttaccaatattagtgaacaaacatgaaaatatgcctatttccattaatttcgaacagttgcaggaattagaaaagttgaagacgttgcgattagattctacgcaatatgatgcagttgtaagtccgaatggtgcaggctctatggaaaaatgggagaaatacacgaatgatattgaacatgtaacagccagaatgatttttgtaactcctgaggaatgggtggagcgaagaattgctgcgccgaatgatccgacagatccagaagacaaatatccagaaatggatgtagaaacggctttggatattggattcgagcagttcaagaaaacagagacaggatatcaatacaaggattattcatttgaaaaagttcacatgatttacgatgaagaaacagcggaacggtttaaagaacaggcggaacaagaaacagatgggaaactagatccgaataaaatgaaattgaatgcgaaaatgaatattcagatgagtccagatggatgggctaggaacaataaaatagggaaaacatattattttgaaaatggagaaatggtggtaggaaaaaaagaaattgatggaataccatatgaatttaattctaaaggagaattagttatctccttgtttgatggagcagaagatggaggagaaaagataggaacttggatatatacatataaggtcgatgggggacgctctggaaagaaacaatatcgttcaagtcatttaacgggcggcgtacaattaaattcagatgtgaaacaacagctgaaattattgaatacatactatttaagtatgtatatgaaagcagatgcggagacggagcctatgatagaagtagtgggaaaaaatggtacaataacaagtgaaaaggtaaaattaaacaatgaaggttatcaaagggtgaatatggtgataaaagtggatccgaataatccaatcgacacaatatacgttcgaagtgctgattataaaacgaatgtgtattgggacgatattcaaatttcctcagagaaaatacctgaggaaatagaagagaatctagtagtaaatggagattttgaaaatgatctggaaggttggtatgctatcgaccagcataaaccaaagattcaaaaagaggaaaatggaaataaatatataatgggagaagataagttcatccgtcaagtagagcaaaatataagtgttaaaccgaacactacttatgaggtttcattcagttatcaaaaagaagaagcagactttgaggaagagaatcttgtgttcgtggcggttttggataacaacaaaacagtaggtgtccagtacttggagggaaaaccaggtacaaatgggaagtggaaaacagagaaattccaatttacaacggaatacaatatgagcgaagtcaagcttaatctaatggatatgtatgatggcaccgttaagattgataatgtagtgctaacgaaaatttcatag

SEQ ID NO: 231 - DNA, 759 bp, Artificial sequence
  Synthetic polynucleotide or polypeptide
atggtattaaagcactggagtaaaaggttcatcattgtttctacgttagctttcacagggggatttattatgccgcaagctatgtcacaagcttacgcagcccctatggaatttaaagataatgatgctgcaatgcagtgggcagagaaacattatggaaattggaaatcttctttaagttcaaatgaattacaaacgattgattactacaatcgaggtggtgatgtgcatatacataaaaggctggataggcatcatggggaggagcttattaaaggaaaagaagatgattttggttttcctgctcaattcgattctatagataaaaatatacatttcctgtcgtctgctcttgcaaaaataccaatacctgatgatattattgtttatagcacgataccgttgaattcaagtattttgacagggaatatatttacgggagaggatttgaattcggaggcatatcgtaaacagttaatgaaatatctctactacaatggaactgccaaggcgtctgggtactgttttatgagtacatctctcataaggaagaacgttcatccaggtcgtgctgttctctatttaacggttccaaaaggaacgaaaggagcatatttagggactggtagtgcgtatgatggaaaagaattactgctagagaggggctattactataaaattaataatattgataaagaacccggaacggacaaatggagagtacatgcggaaataacatttaattttttgaaactttag

SEQ ID NO: 232 - DNA, 768 bp, Artificial sequence
  Synthetic polynucleotide or polypeptide
atgtatataaataaattatcaaaatggttaatctgtatcgggataacgatttgtacatttgtaccgacagaaaatagcatcacatcagcagagggaatagacatacacaccaaacaaaattctattcttgaatcatatggggacgaatggttacgtacgttaactgcggatgaaaaacgtgctattacctattatactgggccaaactatgcagatataaattattatttaagaagccggcaacaagaattattgccagaatcatcagtatctaaaatggaattggacactaaaataaatgtaatagattctgcaataaataaagcggtcttgaaagaggatatcacagtgtatagaaatacgggagagcaagaatttcaagaggctaaatattttttacagccaatatggggaccagatttcaattctgtagaaggaattaccaattttgaagagtacataaaaaaagctattacacttgtacaaaagaatataaataaaacgtataccgcacttgcatatacaagtacatctttacagacaggggttgcctttggtcgttcagccattcgtatggaaataaaggtaccaaagggaactcacgcaccatatatagattctatctctaattataaaggagaaaaagaagtacttttgccaagaggatcacattttaaaataaccggtgcatctacagttcaggaaagaggacaaaatacattgattattagagcgacattcatagattctgttgcaaagtttttttaa

SEQ ID NO: 233 - DNA, 732 bp, Artificial sequence
  Synthetic polynucleotide or polypeptide
atgaaaataaaacatgtaataaaatttactttatcgattttatatcttagtatggctttttttatgaatcaatctaatgtagtaattgcagctccgcctatccaccctgtggctaatcatgggattgatttcaaggaagataaagatcgggctcatgaatggggggtaacatcttttaggaattggttgagggacttaacactcacggaacatcgttctatcgataaatactctggcggtgattatcgtgccattaataattatctaagatttcatgaaggaaatcttggagcggatggtgtcttggatcccctcattcaacaaatggataaagcgttaaaaagagcacgaacacctgataccattacagtatatcgaagagtaggcgagacagcatttggtttagaagcgaatagtttacgagtggggagtattattaatcaagagaaagcgcgagagtttgcagaaacattcatcaatacaacacgaaaagaacatgcttttatgagtacatcactagtgaaacaacctgtaaatgtatttccaattcttcttcatattacggttcccaaaggctcacatggtgcttatatagagtcgattagtcaaaaacctgaagaaatggaattattacttttgagaggatactcttataaaatcgatggagtttctatcattactgaacaggggagacaatctctaaaagtatcggctacgttaatcaaaacataa

SEQ ID NO: 234 - DNA, 795 bp, Artificial sequence
  Synthetic polynucleotide or polypeptide
atgaacataagaaaattaatgattgtaagtttgttaacaagtttcgcatggagtatccctatttctcatgcaccgtatcatgtaccagtgaatacagcatatgctgcaaatacagaagatagagattttaatacggataaagaagcagctagaaaatggggagaagaaaaatataaagactgggaagagaaaaaaataacgaaggaagaaaaagaagtagtacaatattatacgggtagtggggcggatgctattaatgagtatttaaaagccaccgagggtaagttggttgagaaacaagaagatttaccagaaggatacacactgtctgatgcaaaaaaattaaatgaaaaaataacaaaactagaaggggctttggaaaaagctagcacacctgaaacactttcggtttataaacgcgtgagtgaacaacaatttgatatggatgctggtgatttacgtccgaatggtccaaatggtggtcttgatttagcaaaagtgcaacaaatacagaatgattttcaggggaaaacatttgagcctttgaagtttatgagtacgtcactatcgaaggatccagataaatcatttggcccccagcgctatgctattttattgcatattaaacttccaaaaggtacagctgccgcttatataggtgatttaagtaaatattcagagcaaatagaattgctggtacagaaagggtatacgtataaatacgacaaattcactattatcaacgataatggtatacaatcgctgaaggttgatgtttctttaattccacaatag

SEQ ID NO: 235 - DNA, 855 bp, Artificial sequence
  Synthetic polynucleotide or polypeptide
atgattttgaaaaataaacacatactaaatatatgtagtgtatgtataggtatgatgtcattactaacaatacctatacatacttcagcagagacggtgacttctaatcaacagtgtcattctacaaatccattggattttcattcaacatgtaaatcagaagcaatagcatggggaaatgaaagatttaacttgtggaataaacttactccacaagtagagaaagatgcgatacgaggatatactgcgctggattatggtaggattaacggatatcttcgttcggattattatgatatcctagatcaagaaaaagtagagcagagtattaaacagatagatcgtgcgttttctagggatagactacatgatgatatcatagtctatcgtcgagtaggtgagagggcatttggattaccggaaagttcattagtgaaacgtgatgtaaaagaagacgattcagttaacagtacttcaaagatagatatggaaagatttaatttttttaaaaatatatttcaaggaaaatataaaaaagatccagcgtatatgagtactagtattgtgaaagatgcagcggcaggatttgatgaattacctattttactgaaaattcatgttcctaaaggggtcccagctatttatgtagcccctgtaagtcaggtccctgaagaaatggaactacttttaccgagaaatagaacatataaagttatcaatatatcacccatagtcgaaaaagataaagaatatgtaatgctcgatgttgagattttagatatcgaatctaattatcgaaataaacgttctaccgacattatatatgaagacagtttaccatcgctagcaaaatag

SEQ ID NO: 236 - DNA, 801 bp, Artificial sequence
  Synthetic polynucleotide or polypeptide
atggtatcgtcattaacgataccggtaggcatttcagcagagacaactgtaaatcaacagtgtcattccacaacactattgaattttaaacccgaatgtaaagcggaagcgacagattggggaaaagaattctttgacctttggaataaacttaccccacaagcagaaaaaaatgccgtaagagactatacaggagggggatactatcctattaatgaatatcttcgttctaattattttgatgttctagatcaagaaaaaacagagaagagtattacccagatagatcgtgctttttcgagagtgagactacatgatgatatgatagtttatcgccgagtaagtgaaagtgcatttggattaccagcaaactccttagtgaaacttgatttaaaagaggatgatccagttaatagtacttcaaagataaatacggaaagctttgaacactttaaagagaggtttcaaggaaaatataaagaagatccagcgtatatgagtaccagtattgttaaagacgcagcaaaaacatttagtttactgcctattttgatgaaaatccatgttcctaaaggggtacccgctatatatgtagatttattaagtaaggttcctggggaaatggaattactattgccaagaaatagaacgtataaggttacaaatatatcaccagtaattgaaaaagacaaagaatatgtaatgctagatgttgaaattttagatatagaatctaattatcgaaataaacgttctactgatattatatatgaagataacctaccgtcattatcaaaataa

SEQ ID NO: 237 - DNA, 771 bp, Artificial sequence
  Synthetic polynucleotide or polypeptide
atgtatataaataaattatcaaaatggttactctgtatcgggataacgatttgtacacttgtaccggcaggaaatagtatcacattagcagagggaatagacatacataccaaacaaaattctatttttgaattatatggggacgaatggctaaatacgttaacggcggatgaaaaacgtgctattacctattatactgggccgaactacgcagatataaatcattatttaagaagccagcaacaagaattattgtcagaatcatcagtatctaaaaaggaattggacactaaaataaatctaatagattctgcaataaataaagcggttttgaaagaggatatcacagtgtatagaaatacgggagagcaagaatttcaagaggctagatattttttacagccaatatggggaccagatttcaattctatagaaggaattacaaattttgaagaatacataaaaaaagccattacacttgtacaaaaaaatataaataaaacgtataccgcacttgcatatacaagtacatctttacagacaggggttgcctttggtcgttcagccattcgtatggaaataaaggtaccaaaaggaacccgtgcaccatatatagattctatttctaattataaaggggaaaaagaagtacttttaccaagaggatcacattttaaaataaccggtgcatctacagttcaggaaagaggacaaaatacattgattattagagcgatattaatggattctgttgcaaagttttctaaatga

SEQ ID NO: 238 - DNA, 714 bp, Artificial sequence
  Synthetic polynucleotide or polypeptide
atgttaaacaagaaaaaaatcaccagtgcggtattatcattgggtattttagctaatggaggatttttcggaagtcccatagcgttagcagcgccaattagtataaataatgagagtattagcacatgggatcaaaataatactcgaaaatgggaaagctcgttgacattagaagaaaaagaggcccttacaggatatactggagaggattatattcctattaacggttatttacgggatccaaagaataatcgtttttcgaaagatgaagtggataaaattaagaagttgattggctatattgattcatctttaaataaggcaaaagcaccagtagatttgacggtgtatagatatgtaaatagtatacgacctctcgggattactcggggaagtaaagatcgtgaaacctatattaaggatgcaatgaatagtgttggaaaacatataaatgaaactatcatagaacccgcgtatgcaagtgcttctttggtgaaagaattagtatatgatgacaggcctattcgatttgaaataacaataccaaaaggaactcatgcagcatatcttagtgaaaatgtgtcatcagctccagaggaggaagaaattttaattcaaagagacagtaaaatgaaattgaaaagtgtatctactagtatggagtcaggacttaagattttgatagttaaagcagagcttatatctacaaaataa

SEQ ID NO: 239 - DNA, 693 bp, Artificial sequence
  Synthetic polynucleotide or polypeptide
atgttaaataagaaaaaaattgcaggagcgttattatcatttggtattttagcaagtggaggctttttggggagtcctgttgctttggcggcgccaatcagtataagtaatgagagtgttagcaaatgggatcagaataatactcgaaaatgggaaagttcgttgacagtggaagaaaaagaggctattaaaggctatactgaatcggattttctgcacattaatggttctttacgtaatccagaggatgatttttatgtccattatatgccgaaagatacaatggataaaattaagaagtcgattggctatcttgattcagcgttaaataaagcagaggcaccatcagatttaacagtgactagaagggtaatgggaataaaaaaccttcctgaggcaaatttgccacttcaagaagcgaaaagaagcattgaaaaacatattaataagattattatggagcctgcatatatgagtactactctgttgcctggtggggctggtgagggatcaattcttttggaaattaagattccaaagggggctcatgtagcataccttggtgaaaagctttcaatagctccagaggaggaagaagttttgattccgaggggtagtaaattaaaagtgaaagatgtatctattgatcgaggggaattattaattaaagtagagcttgtagctacaaaatag

SEQ ID NO: 240 - DNA, 771 bp, Artificial sequence
  Synthetic polynucleotide or polypeptide
atgtatataaacaaattattaaaatggttactctgcatcgggataacgatttatacacttgtaccgacagggaatagcatcacatcagcagagggaataggcatagataccaaacaaaattctatttttgaattatatggggaagaatggctaagtgcattaactacggatgaaaaacgtgctatcacgtactatactgggccgaactacgcagatataaattattatttaagaagccagcaacaagaattattgccagaatcatcagtatctaaaatggaattggacactaaaataaatttaatagattctgcaataaataaagcggtcttgaaagaggatatcacagtgtatagaaatacgggagagcaagaatttcaagaggctagatattttttacagccaatatggggaccagatttcaattctgtagaaggaattacaaattttgaagaatacataaaaaaagccattacacttgtacaaaaaaatataaataatgcgtataccgcacttgcatatacaagtacatctttacagacaggggttgcctttggtcgttcagccattcgtatggaaataaaggtaccaaaaggaacccgtgcaccatatatagattctatttctaattataaaggggaaaaagaagtacttttacctagaggatcacattttaaaataaccggtgcgtctacagttcaggaaagaggacaaaatacattgattattagagcgatattaatggattctgttgcaaagttttctaaatga

SEQ ID NO: 241 - DNA, 696 bp, Artificial sequence
  Synthetic polynucleotide or polypeptide
atgttgttaaaaaagttgagtacaaagttcgttattgtttctacgttagcttttacgggaggatgtttcaccatgccacaaacgatatcaaaggcatacgcagcccctatagaatttgcgaatgatacgagtgccgcaacacagtgggggaaaaagcattacggagattggagatactcgcttagctccaacgaattacaaacaattgattactatacaagaggtggcggttcttcggcaatagataaatatttgattgacactcatggtgccttaatagaaggacgaaaccctgagctagtcaaaaatattagttgcatgaataccgcacttgctaaacatcctattcccgaggatgttgttgtgtatatggcattaccatccgttaattggagcgatttcatgttattagaagatccagctatgcggaaggtattaatcggttctgtccaaggggaacattttatgaatacatatttattacgtgagaaagttcctgccagtcatgcagttctctatttaacagttccaaaaggaacaaaaggggcagttgtagggatcggtagtccgtatgaagaaaaaaaagaattagtgttagatagaggatatgaatataaaattattcatattgataaagaaccgggaacaaataaatggagagtgtatgcggaaattgtgggtaaatggcaaaaataa

SEQ ID NO: 242 - DNA, 759 bp, Artificial sequence
  Synthetic polynucleotide or polypeptide
atggtactaaagcaattgagtaaaaaattcattattgtttctacgttagctttcacggggggatttatgatgccacaagcgatgtcacaagcttatgcagcccctatagaatttaaagataataccgctgcaacgcagtggacggagaaacactatggaaattggagatcttctttgagttcgaatgaattacaagcgattgattactatactcgaggcggtgacgtgcacataaataaaaggctggattggcatcatggggatgaacttattagaggaaaagaagatgattttggctttcctgctcaattcgattctatagctaaaaatatacatttcatggctgctgcacttgccaaaaaaccgatacctgaggatattgttgtttatagcaccataccgtggaattcaaatattttggcgagcgatccaatttcgggggaggctttaaattcggaggcgtatcgtaagcggctaactgaatatctctactataatggaactgccaaagcgtctgggtactgtttcatgagcacctctctcataagggagaacgttcatccaggacgtgctgttctctatttaacggttccaaaaggaacgaaaggagcatatttagggactggtagtggttatgatggaaaagaattactactagagagaggctattactataaaattactaatattgataaagaaccaggaacggataaatggagagtgcatgcggaaataacacttaactttttaaaactgtag

SEQ ID NO: 243 - DNA, 1509 bp, Artificial sequence
  Synthetic polynucleotide or polypeptide
atgaaaataaaaaaagaattcttaaaagtgttgagtatgtcgtttttactaaccgctctcactgtgagtgcaccgcagtttacaaccgttgtacaaggtgcaggtggacacgggggaacggatacagaaataagagataaagatagggataaagacagagatgaggataggaagaaagaggaagaacagagaaaaaagcatgaagaagagatgaaaaagctaatccagcatgttgtaaagatagagattaaagaggaagcagtagcaaaaaaagaagcagtagaatcattacttaaacggttaccagttgatattttgaaattgtatgaagcaattggtggaaagattgtgcttgtggatggagatatcaaaaaagctgatgagttgaaagatgtgaaggaggtacagaccaaagatagtgagggtaacacagtgccattaaatcaacattatgtctatgcaaaaggaggaacagaccctgtcattgtaatccaagcgtcggaagattatgggtatcaaatcaaaaaaggtaaagatgtctactatgagatagggaaagcccttgtacgtgataccttaaaaactgaaacacttaccaatccaacatttattgatctattaaataagatcaaagcagacgaggatgcttctagtcttttattttcagaagtgttacaacagcatgaaggaccatttacagtacgtgatgtacaagataaccgagaggaaatgcaaaatacatttgcgagaatatttgcgtattatatggagccccattctacagatattttagagtcatgtgcacctgatgcattcaaatatatggagacaatcgattgggcgaagttaaaaaaagacatcgaaaaggtagaaacattagattttaaaggggatatagatggtgctcgagaatggggtgaacaaaaatataataattggaaagtaagtttatctaaagaagaaagagatgctatcgtctcatatacaggagctaaatatgatcctattaatggatatcttagagaaaatcaaggtattttaaaaggagacaagttagataaaattatagctgcaatcgattctgggttgcaaaaagcaacaactgatcaatccatcacagtatataaaagggtgtctgaaaataaatttaatcttgaatatggtgatcttcgctcacttacagcaccatatgctattaatgaagaagttttaaaaaaaataaaagatgaattcacgaatacagaatatattggttatggatttgaaagtacctcactagcaaaagatccaagtaaatcttatagtaatgatcgttaccctattttatataagataactgtaccgcaaggtatccatggagcatttatagaaccgataagtaagtacaatgatcaattagaattcttaattgcaagggggtacacgtataaaattaatggtttttctattatttctacaaatgataagccctatgttcaagtggaaatttccattgtcccaggccattaa

SEQ ID NO: 244 - DNA, 3186 bp, Artificial sequence
  Synthetic polynucleotide or polypeptide
atgaaattaaagaatttctataaatgtttagcagttacaacattactcgctcaatttgctgtacttccagaaacatcttatgcagctaccgaaaaatctaacgatacgaatcctaaaacaaaagctactactgtagaaaaccctggaaagggattattaggctactactttcaagataatcaatttagtaatttagctgtcatacaaccaaatacatctggaaagctatattttaataacaaaacacagaaagatctttctgccgaagaaaggaaaaatattcagtctgcaagatggatgggatatattaaaccttctgaaacagcagaataccaactgtccacctcatctgataaaaatgtcattattcaattagatggaaatcttattatgaatcaatctcctatggaacaacatatcaaattggaaaaagataagttatatgaaataaaaatagagtatcgtggagaatctaatcccttagtagatttagagcttttctggtccaccccgaatagagagaaagaacggatttctgatgaacacttgctgagtcccaattttgctgaaaaagcagagcttccccctgaaaaatccgaaaattttttaattccaaatgttaatttgtttgaagagaaacagcaatctactcgaagcaaaagaagtgtggaagccacgttgcaagatacggatagagacggtattccagatgattgggaaactggcggatatacaataaagaacggtgtcctaacatcatgggatgatgcttacagttcccaaggatataaaaaatatgtatctcatccctataatgctcgaaccgctgctgatccatatacagatttccaaaaagtaagcggatacatgccggcggcaacgaaagctgaagcaagagacccattagtagcggcgtatccagctgttggggttggaatggaaaaattaatcttttctaaaaatgaaaatgtgacggaaggttcaacaggatcaaaatctaaaagtacaacaacaacaaatggtagcactgatagtgtagaaattaatgcaggaattggaattactgataaaggacttagttttaatttatcatccaaatattctcattcatggaatcgtagtaccgctgtacaagaaactgagggagaaacttggtccaagcaaattggtattaacacggatcaagcggcatttttaaatgccaatgtgaggtattataatgcgggaactgctccaatttatgaagtacgtccaacaacgaattttatgttaagaaatgcaaatcagtccttaaccacaataaaagctggaccaaatcaaataggaaatagtttatctccaggagatacctatcctaagaaagggcaaggtccaatttcattagataaagcaaatgaagctggaacaatgaaaatttccttaaatgctgctcaattagatagtattcaatcgaaaggagaaacgatagatttagaaacaacacagagtagtggacaatatgggatattagaccctgcaacaggaaaccttgttacagatgccggtaagcaatgggatcatatacgatctaatattgacgcaacttcaggagctttaattttagaaacagggaaggaaaccttagaaagaagaattgccgcacgagatgtcaataatcctgaagacaaaacacctgaaataacagtaggagaggcgattaaaaaagcatttggagcagttgagagaaacggtcaattgtactatacagagcaagatacaggtaaagaaataccaatttctgaaagcgcaatcaatattgtggttgataaaagaacacaagatgaatttaatagacagttagaacaaatgccgaataaaagtgtgtatgatcttacatttaaaagaggtatgaacattacgcttcatatgccttttatgtattatgattttgaagctactactggttttcattatacaagtttagtagatggtggtcatacgggaaagaaaagtgcaaagattccttcaacgacaacggcacatcagcaggctggacttaatttggaaccttataccagttatacaattcgcacctggatgaaatcaccatcaacaagtacgcacaatattggtatccgtttaggacaagggaaaggtctcaatcaagaatttcagttaaacggtaatggatggaaattagtagaactttctttcaatactggagataagccggaaaatttctatggaatagcaatagataataaaggaggctctgaattatattttgatgatctatctattacaaaatggagtgcaacagaagatttagcacgaaatcatgttgtttctcagtggaatccatcacaacaaggttctgtagatggcataacgttttctaaagttcccgagacaactgtacgttatcaactagagattgatggaaaattaacaggtatcaagtctgcttctccagtagatgctcaagggaagcgatctatcaacttcaaagattttaataatggaaatcttattgatgcaggaagcaacattaccgtatatgcggtagatgtaaaaaatgacaatcttaaaataaaagttgcagatcataaaggtcaagatatggtgaagcaacttcgtcctgctagtgttagctatttctacaaaccaattcagaatgcgtatacatttgaaatcaaaacaggagcaaatgcaccacatgcgtcttataaagttgtaaatttagcaaaaaatactactcatgccatgtgggcgggagggccaaatacagcaatgtgggctgactggttgccattaaacttaaaagaccaatatgcggtagtagccatggtcaatggaatgaattataccgtatataaagaaatcggagaaaagatacctggagataaaggcgaagggatatatttatatgcggatgccaattattcagggaaatccatcaggctgcaaaataatgttacgaactttaaagatattggcatgaatgacatggtaagttccatgagaatgattggttcttatgaagtcattgtatacgaaggtgccaattattcagggagatctgtgacgttaaaaaataatattccagaattcaggaatattaatatgcatgataatgtaagttccataaaaatcattggatctaatggtgctgtagtatacgaaaattccaacatgaataacgaataa

SEQ ID NO: 245 - DNA, 2184 bp, Artificial sequence
  Synthetic polynucleotide or polypeptide
atgcctttagattattcgaaaattttaaagaaagtgttacttacgactactgtaactaccttaagtgttggggtagttacaggctgctcgctgttttcttctgaaaaaaagagcactaaaacggcatcagtatctaaaaagaaaaaggatagtgaaaaagaaaagaaaaaagatgagaagaaagatgaaaataagaatgaaacgactgaaaatctaaatactaatgattttgcagaaatcattgataatgcaaagcgtagctcagatcaaaatttagccggaattattgaaaataacaaaaccaaaaagaaatatgatgatttatctgattcaattgcgaccgcagctataaattcagatagaaatctagcatcagttattgacggtgataaatcaaataatcgtttttcagatttaaatacttcaatagcatcggcaacaaacaatccttctgtctcggataataaggatagtaagaactttgtatttggtggcgatttaaacattaatgatggagttgctattgcagataactcaatacctccaattaatattgataaaaaaccaccaacttctggtgatacaagtggcggggaagtgaaaccgccaactggtggtgaaggtaataatggaggcggtacaaaaccaccaacaggcggagatggtaacgatggtggaggcggtacaaaaccaccaacaggcggagatggtaacgatggtggaggcggtacaaaaccaccaacaggtggagatggtaatgatggtggaggcggtacaaaaccaccgacaggcggagatggtaatgatggtggtacaacaaaaccagaaaaggatacagtgtcaccagtaattacagcaaagcaaggtgtaactgtacatgtaggagatagtttaaatgcaagtaatttagtagaagtaaaagataataaagacccaaacccagtagtaacagtaggagcgtacgatacaagtaaggcaggggaaattcaagtaacagtaacggcaacagatgcatcaggaaatagctcaagtacaacagtaactgtcaacgtagtcgaaaaagaagaagaaagagatacagaagcgccagtaattacagcgaagcaaggtgtgacagtgcatgtaggagatagtttaaatgtaggagacttggtagaagtaagagataataaagatccaaatccagtagtatcgatgggagagtatgatacaagtaaagcaggagaaatccaagtaacagtaacggcaacagatgcatcaggaaatagctcaagtacaacagtaaccgttaacgtagtcgaaaaagaggaagaaaaagacacagaagcaccagtaataacagcgaagctaggtgtaaccgtacatgtaggagatagcttaaatgcaggtgatttagtagtggtaaaagataatatacacccaaatccagtagtgacagtaggtgcatatgatacaagcaaggcaggagaaattcaagtaacagtaacggcgacagatgcatcaggaaatagctcaagtacaacggtaactgtcaccgtagtcgagaaagaagaggagaaagatacagaagcaccagtaattacagtaaaacaagatgtaaccgtacatgtaggagatagcttaaatgcaggtgatttagtagaagtaaaagataataaagatccaaacccagtagtaacagttggagtgtatgatacaagtaaaccaggtacaatatcagttcaagtaacggcaactgataaggcgggtaacagctcaactgcaacggtaacagtaaaagtagtggaaaaggaagaagagaaggatacggaagcaccagtgataacaccaaaacaatatgtaaccgtacatgcgggagataaattgagtccaggaagtttagtgagtgtaaaagataataaagattcaaacccagtagtaacagtgggagcatacgatacaagtacgccaggtacaaaatcagttcaagtaacagcaaccgataaggcaggaaacagctcaactgaaacagtgaatgtggtagttcttgagaaagaaaagccagaacagaaaccagaacagaagccagaacaaaagccagagcagaaaccagaacaaaagccagaacagaaaactgcaggaacaacttctaaagagcaggataatggattacttgcatcaaattctaatgatgtagctaaataa

SEQ ID NO: 246 - DNA, 1770 bp, Artificial sequence
  Synthetic polynucleotide or polypeptide
atgaagtataaagaacgaacacaagcaaagcgcaaatacaaacaagcgcttctggtaacagtcacaacaataacattaggagtaagtacgttaggaagtactgtcactgtatttgctgctgaagaagataatatttcagtaatttcttcacatactcttaacgatgtagggacccagatgagtccagaagaaaaagaaaaaacattttggcaaaaagcgtctactgaattaaatgtcaagaatggtaaaaaatttgcaggaacttcgatgaaggagtttcttaattttgcaaaatctggtgattctgcaagtgcgaataatgctttaagagcgatggtactagcaagctttgattttgttccatatggtatgtttattactccaatagttggttatatatggcccgaacaaggagggattaaagaacaactagaaaaactgaaggatgagattaaagaagatacaaaaaaacaaattgcagaacaacatttgacagatttaaatacagaattttcaaatcttacagaaagtataacacgccttgaaaactcggttaatggcaaaaatcattcaacatattattccgcgggtagtatagaggaaactcgacgtatctgggctgctcagattgagtttcacttcggtaaaatactaaaacttgctaaagaagaggcacacaaaatagacgacttacctttatacactcaggtagcagctgctcatataatctttttgaaaaacttagaaaaaaacggaatagggcctaaatatcaatttgattctcaatccttaaaagatttttatggtacagcacatattcagaaaaccattgctgagtacgagaaatacattgctgaaacatataaacaagctaatagcgagaacatggaaaagatagaaaaattgaatgcattcgattctgaagtgatagctcataatttttatgacccaaacacaagtgcaacaattaaacaaaagctgaacgaactcaaaactaaataccaagctaaggtcaaagatataaatagggaacttgtatttccagggggatgggctgctcataatagagcactgaatgaagctgaaaacgctttaaacaacgtaatcaatgccttagctgcagctaactttttatcaaacttgattgacacaacatttcatgatccagcattcaatatggcagcatcattaggtacgtggatagaagaaaaggacggaaaaacaggaaaggaaataaagcagcactactattataaaaatcgttccgggaatctggtcacggaatggctgaatatcgggaggtctatgtattactttagccctgaagaaaattttgaaaattcttcaggtgagaaatttaaaagaggagaattggttattggttggattaatactcaggatgaagataatacaattagaacgtatttcctaagccgtcaggatggtgatcaaaactctgacggagaaatatttaatcgaggacaaatggtgaccggaatggctgacattacgtatgagaacggggataaggaatctcattatttcagcccggaagacggtcttaaaaactctgacggagaaatatttgatcgcggacaaatgatgacgaaatgggttgaaattaagaatacaaagactggtgagaaacactggtattacttcaaccctgacgacggtactatgatagcaaacaaaaaggcggtacaaattgggggcaaaaaatatgattttgattccaatggtgtatgtaccacgccaaacggttactaa

SEQ ID NO: 247 - DNA, 3204 bp, Artificial sequence
  Synthetic polynucleotide or polypeptide
atgtcgaagaagaaaaagagcagggtattggtagctggtatatgcatatctacattattatcaccagtagctttcgaagcatcgaaaggatatgcagcgcctttggaagagaataagggcgggcagttggaagagagtcaagagaatcgtttggagcagagaatgtttcatgtacctggaaaaggtgatgtcactgaggaacgagatcgtttaaaggtggaatgggaactggcggcaaatgaaccaactgggatttatgcgaagccaaatgaagaaattaaaattgaaataaaaggtgataagtctattaaggcttttataggaacatatgcgtatgatgaagaagagcctaaggaatttgagttgaaacctggggaaaatgtaatatcatcttcggtgggcgggatactatatttctataactcaaacaatcaaggagaaataacagctgaagttactaatggtggaagtcactttccattattcatactagggaagcataccaaaaaagattgggatgaaatgttgaaaaagtatgaaaatccatatgcagtggaattaagaggagaaagaagcttaatcacatcaagttatgatgctgtacaaaattatatgaaaaatacagatccaacaaaattattgaagctacatgatcaaattatccgtatagaaaatgagatatcgggattatctgaagagggtgtaggagtggcgaaagcaccaaaacactatgttcaatttgttgaaaatagatatccagatgagggcgattggatggatgcatactattaccgcacttcttatgttaagaaagcgctgaagcgtgtattagatagtgaagagttaaaatctaatggatggggtccttggcatgaagttggacatttacatcagcaggcaccttgggattgggaaggtttgggagaggtaacagttaatatttactctttagcagttcaaactaagtttgggcatagaacaaggctggaagaagaagggcgctacaaagcagcttttgcatatttaggtaaaccagatgcgcaagagaagatggaagaattcgagaaattagttatgttttggcaattgcatttagtttatggagatcaattctatccacacctccatcaaatgtatcgtatgttacaagatacagaaatgcctaaatctgatgaagagaaaaagcagttgtttatttacatgacttcaaagctggctggtcaaaatttaactcctttctttgaaaaatggggattaactccaaatgatgatactagagcgaagatagaaaaattaaatttatctaaattagaaaaagaaatatggaaagctacagatagtaatgatattcgtgaaaagcaagttgaagcgtacgcaattccatacggtgaaccgtcaagtgaggtgcaaaaccttgtagtgggtacagagtttgatgagaaggaagcaagtaaactcgttcaaaatttaggtgagaatgtaaaagtaacaggtaagattatatggcctaaattagaggatggaaaacaggaagtattggtagaaattgtagataataaagggaataagaatttaataactgttccagtcaattctcgttatggggatgctatggtagttaaaggttttggtgatgaagtgagttctgttataacacttcttcataatgaaaagaaaattgatgttgatttcagtgttaatgcactccatcatcgatttaaaaacgaaaaatatgtagagattacagtatacgataaagaaggtaatgaaaagagaaatatttctgtagaggggcaagaaagttcaaaaaaaattgctgagcaattgaaagagattgaatttcaatatggagacattgtgaaagtatttcatgcggaaccagatcgttttagttggtatcaaaatgacaagctagtaaatccagcagaaaataggaataaaaaagaaaagtttttcaaaatcactccacaagggtttgaattaaaaaatagtttgcacgaagtagcagcattaccacaaatggtagtagtcggggcagatactgaaaaattagatgccaaaaactttgttgaagtgaaagacggagaagtaattggatttgtggaaaaaccaactacatcaaaagtcggaaaacaaacagtaaaagtagaaacgaaagatcgatttggaaataagaaagtaacggaagtaccgttggaaataatttatggcgatagtatagtcttccaaggtgatggcaatgatacgcgttctgtcgtaactgcggagcataatgagaaaaagttacgggcaatatttacggattctaaagttcattatcgctttgagaatgaaaaatatatgggaatcacgctatatgatcaaaatggaaatgaaaagaaggttatttcggtagaagggcaagagacttctaaaaactttgcagaacagttaaatggtgtagactttgcatatggtgatgttattaaggtatatcatgcagaatcagatcgattgaagtggtatgaaaagaatgaatttgtaggtaacggtaaagggaaagtggagcaagaattgtactttgaaataacggaaaaaggttttgaaaaactggaaggcttacaagaagtaacagcagtaccacagaaggtagtaatcgggacaaatgcagaaaaaataaatgtaaaagactttgtggaagtaaaagatggagaagtagttggttttgtggagaagccagatacaacgaaaatcggaaagcaaacagtaagagtagaaacaaaagatcgttttggaaataaaaaggtgacagaagttcctatggaagtaacatacggagatagcgtagtgtatcaaggtgtatctaatataacccgttcaatcgttacgctaaatcatgggaaaaagaaattacatgcaacatttacagatgagacaatccattatcgatttgtaaatgagcagtatataggtcttacgctttatgattcaaatggtaaagagaaaaagcatgtaacagcagaaggacaagaaacttcaaagaattttgcagagcaagtaaacggtacttccttccagtatggggatgtagtgaaagtgtatcatgctgaatcagatcgtttaatttggtataaaaatagtgagttagttggaaaaggagataagaaaaagtttaaagaaatttcctttaaaattactccgaatggcttagagcaagtacaataa

1-5. (canceled)

6. A fusion protein comprising a Bt protein and a beta-lactamase as a fusion tag.

7. The fusion protein according to claim 6, wherein the Bt protein is a Bt protein unable to be expressed.

8. A nucleic acid molecule encoding the fusion protein according to claim 6.

9. A vector comprising the nucleic acid molecule according to claim 8.

10. The vector according to claim 9, wherein the vector is a pSol-Bla vector into which a Bt gene to be expressed is inserted, or a modified pSol-Bla vector as shown in FIG. 1 into which a Bt gene to be expressed is inserted.

11. A cell comprising the vector according to claim 9.

12. The cell according to claim 11, wherein the cell is an Escherichia coli cell.

13. The cell according to claim 12, wherein the Escherichia coli cell is an Escherichia coli 10G or BL21 (DE3) cell.

14. A method for expressing a Bt protein, comprising:
(1) culturing the cell according to claim 11 under conditions suitable for expressing the desired protein; and
(2) optionally, cleaving the Bla tag to obtain a Bt protein without the tag.

15. A modified pSol-Bla vector as shown in FIG. 1.
